(19) United States
(12) Patent Application Publication
(10) Pub. No.: US 2025/0171777 A1
(43) Pub. Date: May 29, 2025

(54) Microtubule Associated Protein Tau (MAPT) iRNA Agent Compositions and Methods of Use Thereof

(71) Applicants: ALNYLAM PHARMACEUTICALS, INC., CAMBRIDGE, MA (US); REGENERON PHARMACEUTIALS, INC., TARRYTOWN, NY (US)

(72) Inventors: JEFFREY ZUBER, SOMERVILLE, MA (US); JONATHAN EDWARD FARLEY, BOSTON, MA (US); ADAM CASTORENO, FRAMINGHAM, MA (US); JEFFERY HAINES, NEW YORK, NY (US); SEAN GANNON, TARRYTOWN, NY (US)

(73) Assignees: ALNYLAM PHARMACEUTICALS, INC., CAMBRIDGE, MA (US); REGENERON PHARMACEUTIALS, INC., TARRYTOWN, NY (US)

(21) Appl. No.: 18/837,453

(22) PCT Filed: Feb. 10, 2023
(86) PCT No.: PCT/US2023/062440

§ 371 Date: Aug. 9, 2024

Related U.S. Application Data
(60) Provisional application No. 63/322,618, filed on Mar. 22, 2022.
(60) Provisional application No. 63/309,399, filed on Feb. 11, 2022.

(51) Int. Cl. C12N 15/113

(52) U.S. Cl. CPC C12N 15/113; C12N 2310/14; C12N 2310/315; C12N 2310/321; C12N 2310/322; C12N 2310/3515

(57) ABSTRACT

The disclosure relates to double stranded ribonucleic acid interference (dsRNAi) agents and compositions targeting a hotspot within exon 10 of a microtubule-associated protein tau (MAPT) gene, as well as methods of inhibiting expression of 4R-tau and methods of treating subjects having a 4R-tau-associated disease or disorder, e.g., a 4R-tauopathy such as progressive supranuclear palsy (PSP), corticobasal syndrome (CBD), argyrophilic grain disease (AGD), multiple system tauopathy with presensile dementia (MSTD), globular glial tauopathy (GGT), sporadic (spAD) Alzheimer's disease, or rapidly progressive (rpAD) Alzheimer's disease using such dsRNAi agents and compositions.

### CROSS-REFERENCE TO RELATED APPLICATIONS

[0001] The application claims the benefit of priority to U.S. Provisional Application No. 63/309,399 filed on Feb. 11, 2022 and U.S. Provisional Application No. 63/322,618 filed on Mar. 22, 2022. The entire contents of the foregoing applications are hereby incorporated herein by reference.

### SEQUENCE LISTING

[0002] The instant application contains a Sequence Listing which has been submitted electronically in XML format and is hereby incorporated by reference in its entirety. The XML copy, created on Feb. 10, 2023, is named A108868_1580WO_SL_XML and is 4,839,728 bytes in size.

### BACKGROUND OF THE INVENTION

[0003] The microtubule associated protein tau (MAPT) gene encoding the protein Microtubule-Associated Protein Tau (Mapt), a member of the microtubule-associated protein family, is located in the chromosomal region 17q21.31 (base pairs 45,894,382 to 46,028,334 on chromosome 17). The MAPT gene consists of 16 exons. Alternative mRNA splicing gives rise to six MAPT isoforms with a total of 352-441 amino acids. In three of the six MAPT isoforms, the microtubule-binding domain of MAPT contains three repeated segments (3R-tau isoforms), whereas the corresponding domain contains four repeated segments in the other three MAPT isoforms (4R-tau isoforms).

[0004] MAPT transcripts are differentially expressed throughout the body, predominantly in the central and peripheral nervous system. Wild type Tau is involved in stabilizing microtubules in neuronal axons, maintaining dendric spines, and regulating axonal transport, microtubule dynamics, and cell division. Pathogenic variants of MAPT are found in approximately 10% of patients with primary tauopathy. Variants are primarily missense mutations and localized in exons 9-13 (microtubule binding domains), with many affecting the alternative splicing of exon 10.

[0005] Tauopathies are a heterogeneous class of progressive neurodegenerative disorders pathologically characterized by the presence of Tau aggregates in the brain. Phenotypically, tauopathies show variable progression of motor, cognitive, and behavioral impairment. Humans normally express equal ratios of 3R-tau and 4R-tau. In some tauopathies, such as Alzheimer's disease, experimental evidence from post-mortem brain tissue suggest that the insoluble aggregates of tau are comprised of 3R-tau and 4R-tau. However, both sporadic (spAD) and rapidly progressive (rpAD) Alzheimer's disease have recently been characterized by 4R-tau enriched aggregates (see, Kim et al. Science Translational Med. 2022 14, eabg025). In other 4R-tauopathy diseases, such as progressive supranuclear palsy (PSP) and cortical basal degeneration (CBD), the 4R-tau proteins are the aggregate-prone species of tau. The reasons underlying these differential types of aggregates in diseases is unknown.

[0006] There are currently no curative therapies for 4R-tauopathies, and treatments are only aimed at alleviating the symptoms and improving the patient's quality of life. Accordingly, there is a need for agents that can efficiently, and preferably preferentially, inhibit or adjust the expression of 4R-tau such that subjects having a 4R-tau-associated disorder, such as progressive supranuclear palsy (PSP), corticobasal syndrome (CBD), argyrophilic grain disease (AGD), multiple system tauopathy with presensile dementia (MSTD), globular glial tauopathy (GGT), sporadic (spAD) Alzheimer's disease, rapidly progressive (rpAD) Alzheimer's disease, or another 4R-tauopathy, can be effectively treated.

### BRIEF SUMMARY OF THE INVENTION

[0007] The present disclosure provides RNAi compositions, which effect the RNA-induced silencing complex (RISC)-mediated cleavage of 4R-tau RNA transcripts of a MAPT gene by targeting a particular hotspot region within exon 10 of the MAPT gene. The MAPT gene may be within a cell, e.g., a cell within a subject, such as a human. The use of these iRNAs enables the targeted degradation of 4R-tau mRNAs of the corresponding gene (MAPT gene) in mammals.

[0008] The iRNAs of the disclosure have been designed to target a hotspot within exon 10 of a MAPT gene, e.g., a MAPT gene having missense and/or deletion mutations in the exons of the gene, and having a combination of nucleotide modifications. The iRNAs of the disclosure inhibit the expression of 4R-tau transcripts by at least about 25%, at least about 30%, at least about 40%, at least about 50%, at least about 60%, at least about 70%, at least about 80%, at least about 90%, or at least about 95%, relative to control levels, and reduce the level of sense- and antisense-containing foci. Without intending to be limited by theory, it is believed that a combination or sub-combination of the foregoing properties and the specific target sites, or the specific modifications in these iRNAs confer to the iRNAs of the disclosure improved efficacy, stability, potency, durability, and safety. The combination or sub-combination of the foregoing properties and the specific target sites, or the specific modifications in these iRNAs may also confer to the iRNAs of the disclosure enhanced specificity for 4R-tau isoforms of the MAPT gene, relative to 3R-tau isoforms.

[0009] In one aspect, the present disclosure provides a double stranded ribonucleic acid (dsRNA) agent for inhibiting expression of 4R-tau, wherein the dsRNA agent comprises a sense strand and an antisense strand forming a double stranded region, and wherein the sense strand comprises at least 15 contiguous nucleotides differing by no more than 3 nucleotides from the nucleotide sequence of nucleotides 1009-1053 of SEQ ID NO: 3, and the antisense strand comprises at least 15 contiguous nucleotides differing by no more than 3 nucleotides from the nucleotide sequence of nucleotides 1007-1053 of SEQ ID NO: 4. In a particular embodiment, the sense strand comprises at least 15 contiguous nucleotides of nucleotides 1009-1053 of SEQ ID NO: 3, and the antisense strand comprises at least 15 contiguous nucleotides of nucleotides 1007-1053 of SEQ ID NO: 4.

[0010] In another aspect, the present disclosure provides a dsRNA agent for inhibiting expression of 4R-tau, wherein the dsRNA agent comprises a sense strand and an antisense strand forming a double stranded region, wherein the antisense strand comprises a region of complementarity to an mRNA encoding 4R-tau, and wherein the region of complementarity comprises at least 15 contiguous nucleotides differing by no more than 3 nucleotides from the nucleotide sequence of nucleotides 1007-1053 of SEQ ID NO: 4. In a particular embodiment, the region of complementarity comprises at least 15 contiguous nucleotides of nucleotides 1007-1053 of SEQ ID NO: 4. The region of complementarity may reside fully within nucleotides 1007-1053 of SEQ ID NO: 4.

[0011] In yet another aspect, the present disclosure provides a dsRNA agent for inhibiting expression of 4R-tau, wherein the dsRNA agent comprises a sense strand and an antisense strand forming a double stranded region, wherein the antisense strand comprises a region of complementarity to an mRNA encoding 4R-tau, and wherein the region of complementarity comprises at least 15 contiguous nucleotides differing by no more than 3 nucleotides from any one of the antisense nucleotide sequences in Table 7 or 8. In a particular embodiment, the nucleotide sequence of the sense and antisense strand comprise any the sense and antisense strand nucleotide sequences of any one of the duplexes in Table 7 or 8.

[0012] In some embodiments of the dsRNA agent according to any of the aforementioned aspects, the sense strand comprises at least 15 contiguous nucleotides differing by no more than three nucleotides from any one of the nucleotide sequence of nucleotides 1009-1029, 1016-1036, 1018-1038, 1020-1040, 1021-1041, 1022-1042, 1024-1044, 1027-1047, 1028-1048, 1029-1049, 1030-1050, 1032-1052, 1033-1053, 1014-1048, and 1022-1048 of SEQ ID NO: 3, and the antisense strand comprises at least 15 contiguous nucleotides from the corresponding nucleotide sequence of SEQ ID NO: 4.

[0013] In some embodiments, the antisense strand comprises at least 15 contiguous nucleotides differing by no more than three nucleotides from any one of the antisense strand nucleotide sequences of a duplex selected from the group consisting of AD-1423276, AD-1423283, AD-1423285, AD-1423287, AD-1423288, AD-1423289, AD-1423291, AD-1423294, AD-1423295, AD-1423296, AD-1423297, AD-1423299, and AD-1423300. In specific embodiments, the antisense strand comprises at least 15 contiguous nucleotides differing by no more than three nucleotides from any one of the antisense strand nucleotide sequences of a duplex selected from the group consisting of AD-1423283, AD-1423291, AD-1423294, and AD-1423295.

[0014] In some embodiments, the dsRNA agent is able to decrease 4R-tau isoform mRNA expression by at least about 50%, 55%, 60%, 65%, 70%, or 75%, while decreasing 3R-tau isoform mRNA expression by no more than about 40%, 35%, 30%, 25%, 20%, 15%, 10%, or 5% in a cell expressing both 3R tau and 4R tau isoforms.

[0015] In some embodiments, the dsRNA agent is able to decrease 4R-tau isoform mRNA expression by at least about 70%, while decreasing 3R-tau isoform mRNA expression by no more than about 30% in a cell expressing both 3R tau and 4R tau isoforms.

[0016] In one embodiment, the sense strand, the antisense strand, or both the sense strand and the antisense strand described herein, is/are conjugated to one or more lipophilic moieties.

[0017] In one embodiment, the lipophilic moiety is conjugated to one or more internal positions in the double stranded region of the dsRNA agent.

[0018] In one embodiment, the lipophilic moiety is conjugated via a linker or carrier.

[0019] In one embodiment, the lipophilicity of the lipophilic moiety, measured by logKow, exceeds 0.

[0020] In one embodiment, the hydrophobicity of the double-stranded RNA agent, measured by the unbound fraction in a plasma protein binding assay of the double-stranded RNA agent, exceeds 0.2.

[0021] In one embodiment, the plasma protein binding assay is an electrophoretic mobility shift assay using human serum albumin protein.

[0022] In some embodiments, the dsRNA agent comprises at least one modified nucleotide.

[0023] In one embodiment, no more than five of the sense strand nucleotides and no more than five of the nucleotides of the antisense strand in a dsRNA agent of the present disclosure are unmodified nucleotides.

[0024] In one embodiment, all of the nucleotides of the sense strand and all of the nucleotides of the antisense strand in the dsRNA agent are modified nucleotides.

[0025] In some embodiments, at least one of the modified nucleotides of the dsRNA agent is selected from the group consisting of a deoxy-nucleotide, a 3′-terminal deoxythimidine (dT) nucleotide, a 2′-O-methyl modified nucleotide, a 2′-fluoro modified nucleotide, a 2′-deoxy-modified nucleotide, a locked nucleotide, an unlocked nucleotide, a conformationally restricted nucleotide, a constrained ethyl nucleotide, an abasic nucleotide, a 2′-amino-modified nucleotide, a 2′-O-allyl-modified nucleotide, 2′-C-alkyl-modified nucleotide, 2′-hydroxly-modified nucleotide, a 2′-methoxyethyl modified nucleotide, a 2′-O-alkyl-modified nucleotide, a morpholino nucleotide, a phosphoramidate, a non-natural base comprising nucleotide, a tetrahydropyran modified nucleotide, a 1,5-anhydrohexitol modified nucleotide, a cyclohexenyl modified nucleotide, a nucleotide comprising a 5′-phosphorothioate group, a nucleotide comprising a 5′-methylphosphonate group, a nucleotide comprising a 5′ phosphate or 5′ phosphate mimic, a nucleotide comprising vinyl phosphonate, a nucleotide comprising adenosine-glycol nucleic acid (GNA), a nucleotide comprising thymidine-glycol nucleic acid (GNA)S-Isomer, a nucleotide comprising 2-hydroxymethyl-tetrahydrofuran-5-phosphate, a nucleotide comprising 2′-deoxythymidine-3′phosphate, a nucleotide comprising 2′-deoxyguanosine-3′-phosphate, and a terminal nucleotide linked to a cholesteryl derivative and a dodecanoic acid bisdecylamide group; and combinations thereof.

[0026] In one embodiment, the modified nucleotide of the dsRNA agent is selected from the group consisting of a 2′-deoxy-2′-fluoro modified nucleotide, a 2′-deoxy-modified nucleotide, 3′-terminal deoxythimidine nucleotides (dT), a locked nucleotide, an abasic nucleotide, a 2′-amino-modified nucleotide, a 2′-alkyl-modified nucleotide, a morpholino nucleotide, a phosphoramidate, and a non-natural base comprising nucleotide.

[0027] In one embodiment, the modified nucleotide of the dsRNA comprises a short sequence of 3′-terminal deoxythimidine nucleotides (dT).

[0028] In one embodiment, the modifications on the nucleotides of the dsRNA agent are 2′-O-methyl, 3-RNA, and 2′-deoxy-2′-fluoro modifications.

[0029] In one embodiment, the modifications on the nucleotides of the dsRNA agent are selected from 2′-O-methyl, 2′-deoxy, GNA, and 2′-deoxy-2′-fluoro modifications.

[0030] In some embodiments, the dsRNA agent further comprises at least one phosphorothioate internucleotide linkage.

[0031] In one embodiment, the dsRNA agent comprises 6-8 phosphorothioate internucleotide linkages.

[0032] In one embodiment, each strand of the dsRNA is no more than 30 nucleotides in length.

[0033] In one embodiment, at least one strand of the dsRNA agent comprises a 3′ overhang of at least 1 nucleotide. In another embodiment, at least one strand of the dsRNA agent comprises a 3′ overhang of at least 2 nucleotides.

[0034] In some embodiments, the double stranded region of the dsRNA agent may be 15-30 nucleotide pairs in length; 17-23 nucleotide pairs in length; 17-25 nucleotide pairs in length; 23-27 nucleotide pairs in length; 19-21 nucleotide pairs in length; or 21-23 nucleotide pairs in length.

[0035] In some embodiments, each strand of the dsRNA may have 19-30 nucleotides;19-23 nucleotides; or 21-23 nucleotides.

[0036] In one embodiment, one or more lipophilic moieties are conjugated to one or more internal positions on at least one strand, such as via a linker or carrier.

[0037] In one embodiment, the internal positions include all positions except the terminal two positions from each end of the at least one strand.

[0038] In another embodiment, the internal positions include all positions except the terminal three positions from each end of the at least one strand.

[0039] In one embodiment, the internal positions exclude a cleavage site region of the sense strand.

[0040] In one embodiment, the internal positions include all positions except positions 9-12, counting from the 5′-end of the sense strand.

[0041] In another embodiment, the internal positions include all positions except positions 11-13, counting from the 3′-end of the sense strand.

[0042] In one embodiment, the internal positions exclude a cleavage site region of the antisense strand.

[0043] In one embodiment, the internal positions include all positions except positions 12-14, counting from the 5′-end of the antisense strand.

[0044] In one embodiment, the internal positions include all positions except positions 11-13 on the sense strand, counting from the 3′-end, and positions 12-14 on the antisense strand, counting from the 5′-end.

[0045] In one embodiment, the one or more lipophilic moieties are conjugated to one or more of the internal positions selected from the group consisting of positions 4-8 and 13-18 on the sense strand, and positions 6-10 and 15-18 on the antisense strand, counting from the 5′end of each strand.

[0046] In another embodiment, the one or more lipophilic moieties are conjugated to one or more of the internal positions selected from the group consisting of positions 5, 6, 7, 15, and 17 on the sense strand, and positions 15 and 17 on the antisense strand, counting from the 5′-end of each strand.

[0047] In one embodiment, the internal positions in the double stranded region exclude a cleavage site region of the sense strand.

[0048] In one embodiment, the sense strand is 21 nucleotides in length, the antisense strand is 23 nucleotides in length, and the lipophilic moiety is conjugated to position 21, position 20, position 15, position 1, position 7, position 6, or position 2 of the sense strand or position 16 of the antisense strand.

[0049] In one embodiment, the lipophilic moiety is conjugated to position 21, position 20, position 15, position 1, or position 7 of the sense strand.

[0050] In another embodiment, the lipophilic moiety is conjugated to position 21, position 20, or position 15 of the sense strand.

[0051] In yet another embodiment, the lipophilic moiety is conjugated to position 20 or position 15 of the sense strand.

[0052] In one embodiment, the lipophilic moiety is conjugated to position 16 of the antisense strand.

[0053] In one embodiment, the lipophilic moiety is an aliphatic, alicyclic, or polyalicyclic compound.

[0054] In one embodiment, the lipophilic moiety is selected from the group consisting of lipid, cholesterol, retinoic acid, cholic acid, adamantane acetic acid, 1-pyrene butyric acid, dihydrotestosterone, 1,3-bis-O(hexadecyl)glycerol, geranyloxyhexyanol, hexadecylglycerol, borneol, menthol, 1,3-propanediol, heptadecyl group, palmitic acid, myristic acid, O3-(oleoyl) lithocholic acid, O3-(oleoyl)cholenic acid, dimethoxytrityl, or phenoxazine.

[0055] In one embodiment, the lipophilic moiety contains a saturated or unsaturated C4-C30 hydrocarbon chain, and an optional functional group selected from the group consisting of hydroxyl, amine, carboxylic acid, sulfonate, phosphate, thiol, azide, and alkyne.

[0056] In one embodiment, the lipophilic moiety contains a saturated or unsaturated C6-C18 hydrocarbon chain.

[0057] In one embodiment, the lipophilic moiety contains a saturated or unsaturated C16 hydrocarbon chain.

[0058] In one embodiment, the saturated or unsaturated C16 hydrocarbon chain is conjugated to position 6, counting from the 5′-end of the strand.

[0059] In one embodiment, the modifications on the nucleotides of the dsRNA agent are selected from 2′-O-methyl, 2′-deoxy, 3-RNA, and 2′-deoxy-2′-fluoro modifications; and at least one nucleotide comprising a lipophilic moiety (e.g., 2′-hexadecyloxy).

[0060] In one embodiment, the modifications on the nucleotides of the dsRNA agent are selected from 2′-O-methyl, 2′-deoxy, GNA, and 2′-deoxy-2′-fluoro modifications; and at least one nucleotide comprising a lipophilic moiety(e.g., 2′-hexadecyloxy).

[0061] In one embodiment, the lipophilic moiety is conjugated via a carrier that replaces one or more nucleotide(s) in the internal position(s) or the double stranded region.

[0062] In one embodiment, the carrier is a cyclic group selected from the group consisting of pyrrolidinyl, pyrazolinyl, pyrazolidinyl, imidazolinyl, imidazolidinyl, piperidinyl, piperazinyl, [1,3]dioxolanyl, oxazolidinyl, isoxazolidinyl, morpholinyl, thiazolidinyl, isothiazolidinyl, quinoxalinyl, pyridazinonyl, tetrahydrofuranyl, and decalinyl; or is an acyclic moiety based on a serinol backbone or a diethanolamine backbone.

[0063] In one embodiment, the lipophilic moiety is conjugated to the double-stranded iRNA agent via a linker containing an ether, thioether, urea, carbonate, amine, amide, maleimide-thioether, disulfide, phosphodiester, sulfonamide linkage, a product of a click reaction, or carbamate.

[0064] In one embodiment, the lipophilic moiety is conjugated to a nucleobase, sugar moiety, or intemucleosidic linkage.

[0065] In one embodiment, the lipophilic moiety or targeting ligand is conjugated via a bio-linker selected from the group consisting of DNA, RNA, disulfide, amide, functionalized monosaccharides or oligosaccharides of galactosamine, glucosamine, glucose, galactose, mannose, and combinations thereof.

[0066] In one embodiment, the 3′ end of the sense strand is protected via an end cap which is a cyclic group having an amine, said cyclic group being selected from the group consisting of pyrrolidinyl, pyrazolinyl, pyrazolidinyl, imidazolinyl, imidazolidinyl, piperidinyl, piperazinyl, [1,3]dioxolanyl, oxazolidinyl, isoxazolidinyl, morpholinyl, thiazolidinyl, isothiazolidinyl, quinoxalinyl, pyridazinonyl, tetrahydrofuranyl, and decalinyl.

[0067] In one embodiment, the dsRNA agent further comprises a targeting ligand that targets a neuronal cell.

[0068] In one embodiment, the dsRNA agent further comprises a terminal, chiral modification occurring at the first internucleotide linkage at the 3′ end of the antisense strand, having the linkage phosphorus atom in Sp configuration, a terminal, chiral modification occurring at the first internucleotide linkage at the 5′ end of the antisense strand, having the linkage phosphorus atom in Rp configuration, and a terminal, chiral modification occurring at the first internucleotide linkage at the 5′ end of the sense strand, having the linkage phosphorus atom in either Rp configuration or Sp configuration.

[0069] In another embodiment, the dsRNA agent further comprises a terminal, chiral modification occurring at the first and second internucleotide linkages at the 3′ end of the antisense strand, having the linkage phosphorus atom in Sp configuration, a terminal, chiral modification occurring at the first internucleotide linkage at the 5′ end of the antisense strand, having the linkage phosphorus atom in Rp configuration, and a terminal, chiral modification occurring at the first internucleotide linkage at the 5′ end of the sense strand, having the linkage phosphorus atom in either Rp or Sp configuration.

[0070] In yet another embodiment, the dsRNA agent further comprises a terminal, chiral modification occurring at the first, second and third internucleotide linkages at the 3′ end of the antisense strand, having the linkage phosphorus atom in Sp configuration, a terminal, chiral modification occurring at the first internucleotide linkage at the 5′ end of the antisense strand, having the linkage phosphorus atom in Rp configuration, and a terminal, chiral modification occurring at the first internucleotide linkage at the 5′ end of the sense strand, having the linkage phosphorus atom in either Rp or Sp configuration.

[0071] In another embodiment, the dsRNA agent further comprises a terminal, chiral modification occurring at the first, and second internucleotide linkages at the 3′ end of the antisense strand, having the linkage phosphorus atom in Sp configuration, a terminal, chiral modification occurring at the third internucleotide linkages at the 3′ end of the antisense strand, having the linkage phosphorus atom in Rp configuration, a terminal, chiral modification occurring at the first internucleotide linkage at the 5′ end of the antisense strand, having the linkage phosphorus atom in Rp configuration, and a terminal, chiral modification occurring at the first internucleotide linkage at the 5′ end of the sense strand, having the linkage phosphorus atom in either Rp or Sp configuration.

[0072] In another embodiment, the dsRNA agent further comprises a terminal, chiral modification occurring at the first, and second internucleotide linkages at the 3′ end of the antisense strand, having the linkage phosphorus atom in Sp configuration, a terminal, chiral modification occurring at the first, and second internucleotide linkages at the 5′ end of the antisense strand, having the linkage phosphorus atom in Rp configuration, and a terminal, chiral modification occurring at the first internucleotide linkage at the 5′ end of the sense strand, having the linkage phosphorus atom in either Rp or Sp configuration.

[0073] In one embodiment, the dsRNA agent further comprises a phosphate or phosphate mimic at the 5′-end of the antisense strand.

[0074] In one embodiment, the phosphate mimic is a 5′-vinyl phosphonate (VP).

[0075] In one embodiment, the base pair at the 1 position of the 5′-end of the antisense strand of the duplex is an AU base pair.

[0076] In one embodiment, the sense strand has a total of 21 nucleotides and the antisense strand has a total of 23 nucleotides.

[0077] The present disclosure also provides cells and pharmaceutical compositions comprising a dsRNA agent of the disclosure and a lipid formulation.

[0078] The present disclosure also provides pharmaceutical compositions for inhibiting expression of a gene encoding 4R-tau comprising a dsRNA agent of the disclosure.

[0079] The present disclosure also provides pharmaceutical compositions for reducing abberant expression (e.g., overexpression) of exon 10-containing MAPT transcripts comprising a dsRNA agent of the disclosure.

[0080] In one embodiment, the dsRNA agent is in an unbuffered solution, such as saline or water.

[0081] In another embodiment, the dsRNA agent is in a buffer solution, such as a buffer solution comprising acetate, citrate, prolamine, carbonate, or phosphate or any combination thereof, or phosphate buffered saline (PBS).

[0082] In one aspect, the present disclosure provides a method of inhibiting or reducing expression of 4R-tau in a cell, the method comprising contacting the cell with a dsRNA agent of the disclosure, or a pharmaceutical composition of the disclosure, thereby inhibiting expression of 4R-tau in the cell.

[0083] In another aspect, the present disclosure provides a method of reducing abberant expression (e.g., overexpression) of exon 10-containing MAPT transcripts in a cell, the method comprising contacting the cell with a dsRNA agent of the disclosure, or a pharmaceutical composition of the disclosure, thereby degrading exon 10-containing MAPT transcripts in the cell.

[0084] In one embodiment, the cell is within a subject.

[0085] In one embodiment, the subject is a human.

[0086] In one embodiment, the subject has a 4R-tau-associated disorder.

[0087] In one embodiment, the subject has a 4R-tau-associated disorder that is a neurodegenerative disorder.

[0088] In one embodiment, the neurodegenerative disorder of the subject is associated with an abnormality of MAPT gene encoded protein 4R-tau.

[0089] In one embodiment, the abnormality of MAPT gene encoded protein 4R-tau results in aggregation of 4R-tau in subject's brain.

[0090] In one embodiment, the neurodegenerative disorder is a familial disorder.

[0091] In one embodiment, the neurodegenerative disorder is a sporadic disorder.

[0092] In one embodiment, the 4R-tau-associated disorder is a 4R-tauopathy selected from the group consisting of progressive supranuclear palsy (PSP), progressive supranuclear palsy-Richardson's syndrome (PSP-RS), corticobasal syndrome (CBD), argyrophilic grain disease (AGD), frontotemporal lobar degeneration due to tau (FTLD-tau), FTLD-tau due to MAPT mutation (e.g., a mutation selected from N279K, L284L, DN296, N296N, N296H, P301L P301S, S305N, and S305S), multiple system tauopathy with presensile dementia (MSTD), globular glial tauopathy (GGT), Parkinsonism similar to Parkinson's disease, nonfluent variant of primary progressive aphasia (nfvPPA), behavioral variant of frontotemporal dementia (bvFTD), primary akinesia with gait freezing (PAGF), primary lateral sclerosis (PLS), fanilial multiple system tauopathy with presenile dementia (FMSTD), familial progressive subcortical giosis (familial pSG), pallido-ponto-nigral degeneration (pPND), familial frontotemporal dementia (e.g., FTD-Kunanoto), and N279K tauopathy.

[0093] In one embodiment, the 4R-tau-associated disorder is a 4R-tauopathy is rapidly progressive Alzheimer's Disease (rpAD). In one embodiment, the 4R-tau-associated disorder is a 4R-tauopathy is sporadic Alzheimer's Disease (spAD).

[0094] In one embodiment, the 4R-tau-associated disorder is a 4R-tauopathy progressive supranuclear palsy (PSP) or progressive supranuclear palsy-Richardson's syndrome (PSP-RS). In another embodiment, the 4R-tau-associated disorder is a 4R-tauopathy progressive supranuclear palsy (PSP).

[0095] In some embodiments, contacting the cell with the dsRNA agent inhibits the expression of 4R-tau by at least about 25%, at least about 30%, at least about 40%, at least about 50%, at least about 60%, at least about 70%, at least about 80%, at least about 90%, or at least about 95%, relative to control levels.

[0096] In one embodiment, the dsRNA agent inhibits the expression of 4R-tau by at least about 25%.

[0097] In some embodiments, inhibiting expression of 4R-tau decreases 4R-tau protein level in serum of the subject by at least about 25%, at least about 30%, at least about 40%, at least about 50%, at least about 60%, at least about 70%, at least about 80%, at least about 90%, or at least about 95%, relative to control levels. In one embodiment, the dsRNA agent decreases 4R-tau protein level in serum of the subject by at least about 25%.

[0098] In one aspect, the present disclosure provides a method of treating a subject having a disorder that would benefit from reduction in 4R-tau expression, comprising administering to the subject a therapeutically effective amount of a dsRNA agent of the disclosure, or a pharmaceutical composition of the disclosure, thereby treating the subject having the disorder that would benefit from reduction in 4R-tau expression.

[0099] In another aspect, the present disclosure provides a method of preventing at least one symptom in a subject having a disorder that would benefit from reduction in 4R-tau expression, comprising administering to the subject a prophylactically effective amount of a dsRNA agent of the disclosure, or a pharmaceutical composition of the disclosure, thereby preventing at least one symptom in the subject having the disorder that would benefit from reduction in 4R-tau expression.

[0100] In one embodiment, the disorder is a 4R-tau-associated disorder.

[0101] In one embodiment, the disorder is associated with an abnormality of MAPT gene encoded protein 4R-tau.

[0102] In one embodiment, the abnormality of MAPT gene encoded protein 4R-tau results in aggregation of 4R-tau in the subject's brain.

[0103] In one embodiment, the 4R-tau-associated disorder is a 4R-tauopathy selected from the group consisting of progressive supranuclear palsy (PSP), progressive supranuclear palsy-Richardson's syndrome (PSP-RS), corticobasal syndrome (CBD), argyrophilic grain disease (AGD), frontotemporal lobar degeneration due to tau (FTLD-tau), FTLD-tau due to MAPT mutation (e.g., a mutation selected from N279K, L284L, DN296, N296N, N296H, P301L P301S, S305N, and S305S), multiple system tauopathy with presensile dementia (MSTD), globular glial tauopathy (GGT), Parkinsonism similar to Parkinson's disease, nonfluent variant of primary progressive aphasia (nfvPPA), behavioral variant of frontotemporal dementia (bvFTD), primary akinesia with gait freezing (PAGF), primary lateral sclerosis (PLS), familial multiple system tauopathy with presenile dementia (FMSTD), familial progressive subcortical gliosis (familial pSG), pallido-ponto-nigral degeneration (pPND), familial frontotemporal dementia (e.g., FTD-Kumamoto), and N279K tauopathy.

[0104] In certain embodiments, the 4R-tau-associated disorder is a 4R-tauopathy, for example, selected from the group consisting of progressive supranuclear palsy (PSP), corticobasal syndrome (CBD), argyrophilic grain disease (AGD), multiple system tauopathy with presensile dementia (MSTD), globular glial tauopathy (GGT), sporadic (spAD) Alzheimer's disease, rapidly progressive (rpAD) Alzheimer's disease.

[0105] In one embodiment, the subject is human.

[0106] In one embodiment, the administration of the dsRNA agent of the disclosure, or the pharmaceutical composition of the disclosure, causes a decrease in 4R-tau aggregation in the subject's brain.

[0107] In one embodiment, the administration of the agent to the subject causes a decrease in 4R-tau accumulation.

[0108] In one embodiment, the dsRNA agent is administered to the subject at a dose of about 0.01 mg/kg to about 50 mg/kg.

[0109] In another embodiment, the dsRNA agent is administered to the subject intrathecally (IT) or intracerebroventricularly (ICV).

[0110] In yet another embodiment, the dsRNA agent is administered to the subject intracisternally. A non-limiting exemplary intracisternal administration comprises an injection into the cisterna magna (cerebellomedullary cistern) by suboccipital puncture.

[0111] In one embodiment, the methods of the disclosure further comprise determining the level of 4R-tau in a sample(s) from the subject.

[0112] In one embodiment, the level of 4R-tau in the subject sample(s) is a 4R-tau protein level in a blood, serum, or cerebrospinal fluid sample(s).

[0113] In one embodiment, the methods of the disclosure further comprise administering to the subject an additional therapeutic agent.

[0114] In one aspect, the present disclosure provides a kit comprising a dsRNA agent of the disclosure, or a pharmaceutical composition of the disclosure.

[0115] In another aspect, the present disclosure provides a vial comprising a dsRNA agent of the disclosure, or a pharmaceutical composition of the disclosure.

[0116] In yet another aspect, the present disclosure provides a syringe comprising a dsRNA agent of the disclosure, or a pharmaceutical composition of the disclosure.

[0117] In another aspect, the present disclosure provides an intrathecal pump comprising a dsRNA agent of the disclosure, or a pharmaceutical composition of the disclosure.

### BRIEF SUMMARY OF THE FIGURES

[0118] FIG. 1 shows percent RNA knockdown as measured by 4R tau and mCherry TaqMan assays for the 65 candidate 4R tau siRNAs.

[0119] FIG. 2 shows relative 4R tau and mCherry expression for thirteen 4R-preferential siRNAs (1 nM and 0.1 nM). Lipofectamine was used as a negative control. Two total tau siRNAs were also used as controls.

[0120] FIG. 3 shows TaqMan qPCR data of expression levels of 4R tau and mCherry (3R tau surrogate) following treatment of HEK293-2N4R-YFP+2N3R-mCherry dual reporter cells with 1 nM of 65 different GalNAc-conjugated siRNAs that were produced by walking the entirety of exon 10 of the MAPT gene. Lipofectamine was used as a negative control. A total tau siRNA was also used as a control.

[0121] FIG. 4 shows the location of where the thirteen 4R preferential siRNAs bind in exon 10 of the MAPT gene. The bottom panel depicts the sequence homology of the R2 domain with the other repeat domains (R1, R3, R4), where asterisks indicate nucleotide homology, and the boxed area is the identified hotspot where the thirteen siRNAs appear to have preferential activity against 4R tau.

[0122] FIG. 5 shows a summary of the IC50 (potency) and percent knockdown at 100 pM concentration of siRNA. The doses for the siRNA treatment were 8-point dose curves and ranged from 0.01 pM to 10 nM depending on the experiment. Tables were sorted on the 4R tau column.

[0123] FIGS. 6A-6B show IC50 graphs for the top four siRNAs that were chosen for in vivo testing (AD-1423291.2, AD-1423283.2, AD-1423294.2, AD-1423295.2). The siRNAs were tested at eight different concentrations in the HEK293 dual reporter cells, the HEK293-2N3R-mCherry only cells, and the HEK293-2N4R-YFP only cells.

[0124] FIG. 7 shows confirmation of 4R preferential knockdown with the duplexes using protein dot blotting. The left panel shows confirmation of specificity of commercially available total tau antibody (mouse monoclonal; clone Tau12), 4R tau antibody (mouse monoclonal, clone 7D12.1), and 3R tau antibody (mouse monoclonal, clone 8E6C11) by blotting with recombinant 1N3R or 1N4R proteins. The right panel shows use of the same antibodies in the HEK293 dual reporter cells treated with vehicle control or siRNA (AD-1091966=total tau reducing siRNA; AD-1423291.2, AD-1423283.2, and AD-1423294.2=4R preferential siRNAs; AD-1423295.2=mixed selectivity siRNA). The experimental set-up is shown at the top.

[0125] FIG. 8 shows confirmation of 4R preferential knockdown with the siRNA duplexes were using protein ELISA-type assays. In panel A, a commercially available total tau ALPHALISA (Perkin Elmer, cat no: AL271C) was used to measure total soluble tau according to the manufacturer's instructions. In panel B, 4R tau protein was measured using the PathScan ELISA kit from Cell Signaling Technologies (cat no: 29443). The experimental set-up is shown at the top.

[0126] FIG. 9 shows in vivo validation of tau knockdown using the 4R tau siRNAs. The table shows the C16-conjugated duplexes for in vivo dosing, corresponding GalNAc-conjugated duplexes used for in vitro experiments, and sample size for number of mouse samples used for the RT-qPCR assays. The graph shows RT-qPCR data of expression levels of total tau and 4R tau on RNA extracted from the brains of mice treated with 4R tau siRNAs. Values are graphed as relative expression (1/2^{ΔΔCt}) to the naïve group and normalized to mouse GAPDH.

[0127] FIG. 10 shows dose-response graphs for the dual reporter cell line (HEK293-2N4R-YFP+2N3R-mCherry) for the three TaqMan assays that were performed (mCherry, YFP, 4R tau).

[0128] FIG. 11 shows dose-response graphs for the 3R only reporter cell line (HEK293-2N3R-mCherry) for the three TaqMan assays that were performed (mCherry, YFP, 4R tau).

[0129] FIG. 12 shows dose-response graphs for the 4R only reporter cell line (HEK293-2N4R-YFP) for the three TaqMan assays that were performed (mCherry, YFP, 4R tau).

### DETAILED DESCRIPTION OF THE INVENTION

[0130] The present disclosure provides RNAi compositions targeting a “hotspot” region (mapped to nucleotides 1007-1053 of NM_005910.6) of exon 10 of the MAPT gene, which effect the RNA-induced silencing complex (RISC)-mediated cleavage of 4R-tau RNA transcripts of the MAPT gene. The MAPT gene may be within a cell, e.g., a cell within a subject, such as a human. The use of these iRNAs enables the targeted degradation of 4R-tau mRNAs of the corresponding gene (MAPT gene) in mammals.

[0131] The iRNAs of the disclosure have been designed to target a hotspot region of exon 10 of the MAPT gene, e.g., a MAPT gene either with or without nucleotide modifications. The iRNAs of the disclosure inhibit the expression of the 4R-tau isoform by at least about 25%, and reduce the level of sense- and antisense-containing foci. Without intending to be limited by theory, it is believed that a combination or sub-combination of the foregoing properties and the specific target sites, or the specific modifications in these iRNAs confer to the iRNAs of the disclosure improved efficacy, stability, potency, durability, and safety.

[0132] Accordingly, the present disclosure also provides methods of using the RNAi compositions of the disclosure for inhibiting the expression of a 4R-tau isoform or for treating a subject having a disorder that would benefit from inhibiting or reducing the expression of a 4R-tau isoform, e.g., a 4R-tau-associated disease, such as a 4R-tauopathy, e.g., PSP, CBD, AGD, MSTD, GGT, spAD, or rpAD. In certain embodiments, the present disclosure provides methods of using the RNAi compositions of the disclosure for preferentially inhibiting the expression of 4R-tau isoforms with respect to inhibition of 3R-tau isoforms.

[0133] The RNAi agents of the disclosure include an RNA strand (the antisense strand) having a region which is about 30 nucleotides or less in length, e.g., 15-30, 15-29, 15-28, 15-27, 15-26, 15-25, 15-24, 15-23, 15-22, 15-21, 15-20, 15-19, 15-18, 15-17, 18-30, 18-29, 18-28, 18-27, 18-26, 18-25, 18-24, 18-23, 18-22, 18-21, 18-20, 19-30, 19-29, 19-28, 19-27, 19-26, 19-25, 19-24, 19-23, 19-22, 19-21, 19-20, 20-30, 20-29, 20-28, 20-27, 20-26, 20-25, 20-24, 20-23, 20-22, 20-21, 21-30, 21-29, 21-28, 21-27, 21-26, 21-25, 21-24, 21-23, or 21-22 nucleotides in length, which region is substantially complementary to a hotspot within exon 10 of an mRNA transcript of a MAPT gene. In certain embodiments, the RNAi agents of the disclosure include an RNA strand (the antisense strand) having a region which is about 21-23 nucleotides in length, which region is substantially complementary to a hotspot within exon 10 of an mRNA transcript of a MAPT gene.

[0134] In certain embodiments, the RNAi agents of the disclosure include an RNA strand (the antisense strand) which can include longer lengths, for example up to 66 nucleotides, e.g., 36-66, 26-36, 25-36, 31-60, 22-43, 27-53 nucleotides in length with a region of at least 19 contiguous nucleotides that is substantially complementary to a hotspot within exon 10 of an mRNA transcript of a MAPT gene. These RNAi agents with the longer length antisense strands preferably include a second RNA strand (the sense strand) of 20-60 nucleotides in length wherein the sense and antisense strands form a duplex of 18-30 contiguous nucleotides.

[0135] The use of these RNAi agents enables the targeted degradation and/or inhibition of 4R-tau mRNAs of a MAPT gene in mammals. Thus, methods and compositions including these RNAi agents are useful for treating a subject who would benefit by a reduction in the levels or activity of a 4R-tau, such as a subject having a 4R-tau-associated disease, such as a 4R-tauopathy, e.g., PSP, CBD, AGD, MSTD, GGT, spAD, or rpAD. In certain embodiments, methods and compositions including these RNAi agents are useful for treating a subject who would benefit by a preferential reduction in the levels or activity of 4R-tau, with respect to 3R-tau.

[0136] The following detailed description discloses how to make and use compositions containing RNAi agents to inhibit the expression of a 4R-tau isoform of a MAPT gene, as well as compositions and methods for treating subjects having diseases and disorders that would benefit from inhibition or reduction of the expression of the genes.

### I. Definitions

[0137] In order that the present disclosure may be more readily understood, certain terms are first defined. In addition, it should be noted that whenever a value or range of values of a parameter are recited, it is intended that values and ranges intermediate to the recited values are also intended to be part of this disclosure.

[0138] The articles “a” and “an” are used herein to refer to one or to more than one (i.e., to at least one) of the grammatical object of the article. By way of example, “an element” means one element or more than one element, e.g., a plurality of elements.

[0139] The term “including” is used herein to mean, and is used interchangeably with, the phrase “including but not limited to.” The term “or” is used herein to mean, and is used interchangeably with, the term “and/or,” unless context clearly indicates otherwise.

[0140] The term “about” is used herein to mean within the typical ranges of tolerances in the art. For example, “about” can be understood as about 2 standard deviations from the mean. In certain embodiments, about means±10%. In certain embodiments, about means±5%. When about is present before a series of numbers or a range, it is understood that “about” can modify each of the numbers in the series or range.

[0141] The term “at least” prior to a number or series of numbers is understood to include the number adjacent to the term “at least”, and all subsequent numbers or integers that could logically be included, as clear from context. For example, the number of nucleotides in a nucleic acid molecule must be an integer. For example, “at least 18 nucleotides of a 21 nucleotide nucleic acid molecule” means that 18, 19, 20, or 21 nucleotides have the indicated property. When at least is present before a series of numbers or a range, it is understood that “at least” can modify each of the numbers in the series or range.

[0142] As used herein, “no more than” or “less than” is understood as the value adjacent to the phrase and logical lower values or integers, as logical from context, to zero. For example, a duplex with an overhang of “no more than 2 nucleotides” has a 2, 1, or 0 nucleotide overhang. When “no more than” is present before a series of numbers or a range, it is understood that “no more than” can modify each of the numbers in the series or range.

[0143] As used herein, the term “at least about”, when referring to a measurable value such as a parameter, an amount, and the like, is meant to encompass variations of +/−20%, preferably +/−10%, more preferably +/−5%, and still more preferably +/−1% from the specified value, insofar such variations are appropriate to perform in the disclosed disclosure. For example, the inhibition of expression of the MAPT gene by “at least about 25%” means that the inhibition of expression of the MAPT gene can be measured to be any value+/−20% of the specified 25%, i.e., 20%, 30% or any intermediary value between 20-30%.

[0144] As used herein, “control level” refers to the levels of expression of a gene, or expression level of an RNA molecule or expression level of one or more proteins or protein subunits, in a non-modulated cell, tissue or a system identical to the cell, tissue or a system where the RNAi agents, described herein, are expressed. The cell, tissue or a system where the RNAi agents are expressed, have at least 5%, 10%, 20%, 30%, 40%, 50%, 60%, 70%, 80%, 90%, 100%, 2-fold, 3-fold, 4-fold, 5-fold or more expression of the gene, RNA and/or protein described above from that observed in the absence of the RNAi agent. The % and/or fold difference can be calculated relative to the control levels, for example,

$$\% difference = \frac{[ expression with RNAi agent - expression without RNAi agent ]}{expression without RNAi agent} \times 100$$

[0145] As used herein, methods of detection can include determination that the amount of analyte present is below the level of detection of the method.

[0146] In the event of a conflict between an indicated target site and the nucleotide sequence for a sense or antisense strand, the indicated sequence takes precedence.

[0147] In the event of a conflict between a chemical structure and a chemical name, the chemical structure takes precedence.

[0148] The term “MAPT” gene, also known as “DDPAC,” “FTDP-17,” “MAPTL,” “MSTD,” “MTBT1,” “MTBT2,” “PPND,” “PPP1R103,” “TAU,” and “microtubule-associated protein tau,” refers to the gene encoding for a protein called microtubule-associated protein tau (MAPT).

[0149] The MAPT mRNA is expressed throughout the body, predominantly in the central nervous system (i.e., the brain and the spinal cord) and the peripheral nervous system. Wild type Tau is involved in stabilizing microtubules in neuronal axons, regulating axonal transport and microtubule dynamics, maintaining dendric spines, and contributing to genomic DNA integrity.

[0150] Tauopathies are a heterogeneous class of progressive neurodegenerative disorders pathologically characterized by the presence of Tau aggregates in the brain. Intra- and extra-cellular neuronal Tau aggregates cause microtubule disassembly and axonal degeneration, impaired synaptic vesicle release, and prion-like inter-neuronal spread of tau aggregates called “seeding.”

[0151] Phenotypically, tauopathies show variable progression of motor, cognitive, and behavioral impairment. Tauopathies include, but are not limited to, Alzheimer's disease, the most common form of presenile dementia that primarily starts with selective memory impairment, and is associated with degeneration of the frontal lobe, temporal lobe (including hippocampus), and parietal lobe of the brain; frontotemporal dementia (FTD), the second most common form of presenile dementia associated with neuronal atrophy of the frontal and temporal lobes, exhibiting a spectrum of behavioral, language, and movement disorders; and progressive supranuclear palsy (PSP), degeneration of brainstem and basal ganglia, exhibiting gaze dysfunction, extrapyramidal symptoms (Parkinsonism symptoms including limb apraxia, akinesia/bradykinesia, rigidity, and dystonia), and cognitive dysfunction, affecting approximately 20,000 people in the United States.

[0152] FTD further includes, but are not limited to, behavioral variant frontotemporal dementia (bvFTD), associated pathologically with progressive atrophy in the prefrontal and anterior temporal lobes, and clinically with alterations in complex thinking, personality, and behavior, affecting approximately 30,000 people in the United states; primary progressive aphasia—semantic (PPA-S), degeneration of frontal and temporal lobes associated with difficulty comprehending words and struggle with naming; nonfluent variant primary progressive aphasia (nfvPPA), involving degeneration of left post frontal lobe and insula, and exhibiting poor grammar and inability to understand complex sentences, affecting approximately 1,000 people in the United States; primary progressive aphasia—logopenic (PPA-L), degeneration of the left post/spur temporal lobe and the medial parietal lobe, associated with difficulty retrieving words and frequent pauses; frontotemporal dementia with parkinsonism linked to chromosome 17 (FTDP-17), associated pathologically with degeneration of the frontal and temporal lobes, and clinically with speech and movement impairment; Pick's disease (PiD), degeneration of the frontal and temporal lobes, associated with difficulty in language and thinking and behavioral changes; FTD with motor neuron disease, involving degeneration of the cortex and motor neurons; and corticobasal syndrome (CBS), degeneration of posterior frontal and temporal lobes and basal ganglia [i.e., corticobasal degeneration (CBD)], exhibiting extrapyramidal symptoms (similar to those in Parkinson's disease and PSP) and cognitive dysfunction, affecting approximately 2,000 people in the United States. Mutations of MAPT are reported in approximately 10% of patients with bvFTD, nfvPPA, CBS, and PSP, respectively. MAPT is a major component of neurofibrillary tangles in the neuronal cytoplasm, a hallmark in Alzheimer's disease. The aggregation and deposition of MAPT were also observed in approximately 50% of the brains of patients with Parkinson's disease. Involvement of Tau is indicated in the pathogenesis of other diseases including, but not limited to, argyrophilic grain disease (AGD), multiple system tauopathy with presenile dementia (MSTD), white matter tauopathy with globular glial inclusions (FTLD with GGIs), FTLD with MAPT mutations, neurofibrillary tangle (NFT) dementia, FTD with motor neuron disease, amyotrophic lateral sclerosis (ALS), postencephalitic Parkinsonism, Niemann-Pick disease, Huntington disease, type 1 myotonic dystrophy, and Down syndrome (DS).

[0153] The MAPT gene consists of 16 exons (E1-E16). Alternative mRNA splicing of E2, E3, and E10 gives rise to six tau isoforms (352-441 amino acids). E1, E4, E5, E7, E9, E11, E12, E13 are the constitutively spliced exons. E6 and E8 are not transcribed in human brain. E4a is only expressed in the peripheral nervous system. E0 (part of the promotor) and E14 are noncoding exons.

[0154] Pathogenic variants in MAPT are found in approximately 10% of patients with primary tauopathy. Variants are primarily missense and localized in exons 9-13 (microtubule binding domains), with many affecting the alternative splicing of exon 10. Examples of coding region mutations include R5H and R5L in E1; K257T, I260V, L266V, G272V, and G273R in E9; N279K, K280del, L284L, ΔN296, N296N, N296H, ΔN298, P301L, P301S, P301T, G303V, G304S, S305I, S305N, and S305S in E10; L315R, K317M, S320F, P332S in E11; G335S, G335V, Q336R, V337M, E342V, S352L, S356T, V363I, P364S, G366R, and K369I in E12; G389R, R406W, and T427M in E13 of the MAPT gene. MAPT (tau) null (−/−) humans are likely non-viable. The MAPT heterozygote (+/−) humans have unclear or unknown phenotypes. The MAPT over-expressing (+/+/+) humans are associated with early onset dementia, FTD, PSP, and CBD.

[0155] Each of the six isoforms of the MAPT (tau) protein contains three or four repeated segments (R1, R2, R3, and R4) in its microtubule-binding domain. Each repeat is 31 or 32 amino acids in length. Splicing of E9, E10, E11, and E12 gives rise to the R1, R2, R3, and R4, respectively, of the repeated segments in the MAPT's microtubule-binding domain. Three MAPT (tau) isoforms (“4R-tau isoforms”), in which E10 is spliced in, contain four repeated segments (4R), whereas the other three MAPT isoforms (“3R-tau isoforms”), in which E10 is spliced out, contain three repeated segments (3R).

[0156] Translation of E2 and E3 give rise to the N1 and N2 segments, respectively. Alternative splicing of E2 and E3 gives rise to tau isoforms 0N (E2 and E3 are spliced out, resulting in no N segment), 1N (E2 is spliced in and E3 is spliced out, resulting in one N segment), and 2N (E2 and E3 are spliced in, resulting in two N segments). Accordingly, the six MAPT (tau) isoforms resulting from alternative splicing are 2N4R, 1N4R, 0N4R, 2N3R, 1N3R, and 0N3R.

[0157] In healthy individuals, the 3R and 4R MAPT transcript isoforms exist in 1:1 ratio. The 3R/4R isoform ratio is skewed in disease states and the ratio predicts the tau aggregate type. For example, certain intronic mutations and coding region mutations in exon 10 of MAPT (N279K, L284L, DN296, N296N, N296H, S305N and S305S) can increase the splicing of exon 10 which results in an altered ratio between three- and four-repeat isoforms, and overproduction of four-repeat tau.

[0158] The assembly of four-repeat tau into filaments is characteristic of PSP, CBD, argyrophilic grain disease (AGD), multiple system tauopathy with presenile dementia (MSTD), and white matter tauopathy with globular glial inclusions (FTD with GGIs or “globular glial tauopathy” (GGT)), which belong to the FTD spectrum (4R-tauopathy).

[0159] In contrast, in Pick's disease, three-repeat tau predominates in the neuronal inclusions (3R-tauopathy).

[0160] In Alzheimer's disease, or other neurodegenerative diseases with neurofibrillary tangles (NFT dementia), both three- and four-repeat tau isoforms may make up the neurofibrillary lesions (3/4R tauopathy). However, in certain Alzheimer's disease pathologies, four-repeat tau isoforms may be the predominant isoform within neurofibrillary lesions. FTLD with MAPT mutations can be 3R, 4R, or 3/4R tauopathy.

[0161] FTD with motor neuron disease is associated with the FTLD-TDP43 and FTLD-FUS pathology. It is associated with gene mutations of C9ORF72, FUS, TARDBP, and VCP.

[0162] bvFTD is associated with the FTLD-Tau (3R) and FTLD-TDP43 pathology. Ten percent of the cases involve MAPT mutation. It is associated with gene mutations of C9ORF72, GRN, and VCP.

[0163] PPA-S may be sporadic. It is associated with the FTLD-TDP43 pathology.

[0164] nfvPPA is associated with the FTLD-Tau (4R), Alzheimer's disease, and FTLD-TDP43 pathology, in the order of significance. Ten percent of the cases involve MAPT mutation. nfvPPA is further associated with mutations of GRN.

[0165] PPA-L may be sporadic. It is associated with the Alzheimer's disease and FTLD-Tau pathology, in the order of significance.

[0166] CBS is associated with the FTLD-Tau (4R) and Alzheimer's disease pathology, in the order of significance. Ten percent of the case is associated with MAPT mutation. The rest of the cases may be sporadic.

[0167] PSP involves FTLD-Tau (4R) pathology. Ten percent of the case is associated with MAPT mutation. The rest of the cases may be sporadic.

[0168] Tauopathy generally starts at age 60-80 years, and affects the remaining lifespan of 6-10 years. Tauopathies are phenotypically heterogeneous, with variable involvement of motor, cognitive, and behavioral impairment. In particular, progression of motor symptoms is variable.

[0169] There are currently no approved disease-modifying therapies for tauopathies. Available treatments are only aimed at alleviating the symptoms and improving the patient's quality of life as the disease progresses. Drugs in preclinical or clinical development include active and passive immunotherapies; inhibitors of O-deglycosylation, aggregation, kinases, acetylation, caspases or tau expression; phosphatase activators; microtubule stabilizers; and modulators of autophagy or proteosomal degradation. Biomarkers and testing used in clinical trials to assess tauopathy include tau protein phosphorylated at threonine 181 (pTau), total tau protein (tTau), neurofilament light chain (NfL), volumetric MRI (vMRI), and ¹⁸F-diagnostic PET labels (e.g., ¹⁸F-flortaucipir (AV-1451, TAUVID™)).

[0170] Exemplary nucleotide and amino acid sequences of MAPT can be found, for example, at GenBank Accession No. NM_016841.4 (Homo sapiens MAPT variant 4, SEQ ID NO: 1, reverse complement, SEQ ID NO: 2); GenBank Accession No. NM_005910 (Homo sapiens MAPT variant 2, SEQ ID NO: 3, reverse complement, SEQ ID NO: 4); GenBank Accession No. NM_001038609.2 (Mus musculus MAPT, SEQ ID NO: 5; reverse complement, SEQ ID NO: 6); GenBank Accession No.: XM_005584540.1 (Macaca fascicularis MAPT variant X13, SEQ ID NO: 7, reverse complement, SEQ ID NO: 8); GenBank Accession No.: XM_008768277.2 (Rattus norvegicus MAPT, variant X7, SEQ ID NO: 9, reverse complement, SEQ ID NO: 10) and GenBank Accession No.: XM_005624183.3 (Canis lupus MAPT variant X23, SEQ ID NO: 11, reverse complement, SEQ ID NO: 12).

[0171] The nucleotide sequence of the genomic region of human chromosome harboring the MAPT gene may be found in, for example, the Genome Reference Consortium Human Build 38 (also referred to as Human Genome build 38 or GRCh38) available at GenBank. The nucleotide sequence of the genomic region of human chromosome 17 harboring the MAPT gene may also be found at, for example, GenBank Accession No. NC_000017.11, corresponding to nucleotides 45894382-46028334 of human chromosome 17. The nucleotide sequence of the human MAPT gene may be found in, for example, GenBank Accession No. NG_007398.2

[0172] Further examples of MAPT sequences can be found in publically available databases, for example, GenBank, OMIM, and UniProt.

[0173] Additional information on MAPT can be found, for example, at the NCBI web site that refers to gene 100128977. The term MAPT as used herein also refers to variations of the MAPT gene including variants provided in the clinical variant database, for example, at the NCBI clinical variants web site that refers to the term mapt.

[0174] The entire contents of each of the foregoing GenBank Accession numbers and the Gene database numbers are incorporated herein by reference as of the date of filing this application.

[0175] As used herein, “target sequence” refers to a contiguous portion of the nucleotide sequence of exon 10 (SEQ ID NO: 13) in a 4R-tau mRNA molecule formed during the transcription of a MAPT gene, including mRNA that is a product of RNA processing of a primary transcription product (e.g., MAPT mRNA resulting from alternate splicing). In one embodiment, the target portion of the sequence will be at least long enough to serve as a substrate for RNAi-directed cleavage at or near that portion of the nucleotide sequence of an mRNA molecule formed during the transcription of a MAPT gene.

[0176] The target sequence is about 15-30 nucleotides in length. For example, the target sequence can be from about 15-30 nucleotides, 15-29, 15-28, 15-27, 15-26, 15-25, 15-24, 15-23, 15-22, 15-21, 15-20, 15-19, 15-18, 15-17, 18-30, 18-29, 18-28, 18-27, 18-26, 18-25, 18-24, 18-23, 18-22, 18-21, 18-20, 19-30, 19-29, 19-28, 19-27, 19-26, 19-25, 19-24, 19-23, 19-22, 19-21, 19-20, 20-30, 20-29, 20-28, 20-27, 20-26, 20-25, 20-24, 20-23, 20-22, 20-21, 21-30, 21-29, 21-28, 21-27, 21-26, 21-25, 21-24, 21-23, or 21-22 nucleotides in length. In certain embodiments, the target sequence is 19-23 nucleotides in length, optionally 21-23 nucleotides in length. Ranges and lengths intermediate to the above recited ranges and lengths are also contemplated to be part of the disclosure.

[0177] As used herein, the term “strand comprising a sequence” refers to an oligonucleotide comprising a chain of nucleotides that is described by the sequence referred to using the standard nucleotide nomenclature. “G,” “C,” “A,” “T”, and “U” each generally stand for a nucleotide that contains guanine, cytosine, adenine, thymidine, and uracil as a base, respectively in the context of a modified or unmodified nucleotide. However, it will be understood that the term “ribonucleotide” or “nucleotide” can also refer to a modified nucleotide, as further detailed below, or a surrogate replacement moiety (see, e.g., Table 2). The skilled person is well aware that guanine, cytosine, adenine, thymidine, and uracil can be replaced by other moieties without substantially altering the base pairing properties of an oligonucleotide comprising a nucleotide bearing such replacement moiety. For example, without limitation, a nucleotide comprising inosine as its base can base pair with nucleotides containing adenine, cytosine, or uracil. Hence, nucleotides containing uracil, guanine, or adenine can be replaced in the nucleotide sequences of dsRNA featured in the disclosure by a nucleotide containing, for example, inosine. In another example, adenine and cytosine anywhere in the oligonucleotide can be replaced with guanine and uracil, respectively to form G-U Wobble base pairing with the target mRNA. Sequences containing such replacement moieties are suitable for the compositions and methods featured in the disclosure.

[0178] The terms “iRNA”, “RNAi agent,” “iRNA agent,” “RNA interference agent” as used interchangeably herein, refer to an agent that contains RNA as that term is defined herein, and which mediates the targeted cleavage of an RNA transcript via an RNA-induced silencing complex (RISC) pathway. RNA interference (RNAi) is a process that directs the sequence-specific degradation of mRNA. RNAi modulates, e.g., inhibits, the expression of 4R-tau in a cell, e.g., a cell within a subject, such as a mammalian subject.

[0179] In one embodiment, an RNAi agent of the disclosure includes a single stranded RNAi that interacts with a target RNA sequence, e.g., a 4R-tau target mRNA sequence, to direct the cleavage of the target RNA. Without wishing to be bound by theory it is believed that long double stranded RNA introduced into cells is broken down into double-stranded short interfering RNAs (siRNAs) comprising a sense strand and an antisense strand by a Type III endonuclease known as Dicer (Sharp et al. (2001) Genes Dev. 15:485). Dicer, a ribonuclease-III-like enzyme, processes this dsRNA into 19-23 base pair short interfering RNAs with characteristic two base 3′ overhangs (Bernstein, et al., (2001) Nature 409:363). These siRNAs are then incorporated into an RNA-induced silencing complex (RISC) where one or more helicases unwind the siRNA duplex, enabling the complementary antisense strand to guide target recognition (Nykanen, et al., (2001) Cell 107:309). Upon binding to the appropriate target mRNA, one or more endonucleases within the RISC cleave the target to induce silencing (Elbashir, et al., (2001) Genes Dev. 15:188). Thus, in one aspect the disclosure relates to a single stranded RNA (ssRNA) (the antisense strand of a siRNA duplex) generated within a cell and which promotes the formation of a RISC complex to effect silencing of the target gene, i.e., a MAPT gene. Accordingly, the term “siRNA” is also used herein to refer to an RNAi as described above.

[0180] In another embodiment, the RNAi agent may be a single-stranded RNA that is introduced into a cell or organism to inhibit a target mRNA. Single-stranded RNAi agents bind to the RISC endonuclease, Argonaute 2, which then cleaves the target mRNA. The single-stranded siRNAs are generally 15-30 nucleotides and are chemically modified. The design and testing of single-stranded RNAs are described in U.S. Pat. No. 8,101,348 and in Lima et al., (2012) Cell 150:883-894, the entire contents of each of which are hereby incorporated herein by reference. Any of the antisense nucleotide sequences described herein may be used as a single-stranded siRNA as described herein or as chemically modified by the methods described in Lima et al., (2012) Cell 150:883-894.

[0181] In another embodiment, a “RNAi agent” for use in the compositions and methods of the disclosure is a double stranded RNA and is referred to herein as a “double stranded RNAi agent,” “double stranded RNA (dsRNA) molecule,” “dsRNA agent,” or “dsRNA”. The term “dsRNA” refers to a complex of ribonucleic acid molecules, having a duplex structure comprising two anti-parallel and substantially complementary nucleic acid strands, referred to as having “sense” and “antisense” orientations with respect to a target RNA, i.e., a MAPT gene. In some embodiments of the disclosure, a double stranded RNA (dsRNA) triggers the degradation of a target RNA, e.g., an mRNA, through a post-transcriptional gene-silencing mechanism referred to herein as RNA interference or RNAi.

[0182] In general, a dsRNA molecule can include ribonucleotides, but as described in detail herein, each or both strands can also include one or more non-ribonucleotides, e.g., a deoxyribonucleotide, a modified nucleotide. In addition, as used in this specification, an “RNAi agent” may include ribonucleotides with chemical modifications; an RNAi agent may include substantial modifications at multiple nucleotides. As used herein, the term “modified nucleotide” refers to a nucleotide having, independently, a modified sugar moiety, a modified internucleotide linkage, or a modified nucleobase. Thus, the term modified nucleotide encompasses substitutions, additions or removal of, e.g., a functional group or atom, to intemucleoside linkages, sugar moieties, or nucleobases. The modifications suitable for use in the agents of the disclosure include all types of modifications disclosed herein or known in the art. Any such modifications, as used in a siRNA type molecule, are encompassed by “RNAi agent” for the purposes of this specification and claims.

[0183] In certain embodiments of the instant disclosure, inclusion of a deoxy-nucleotide if present within an RNAi agent can be considered to constitute a modified nucleotide.

[0184] The duplex region may be of any length that permits specific degradation of a desired target RNA through a RISC pathway, and may range from about 15-36 base pairs in length, for example, about 15, 16, 17, 18, 19, 20, 21, 22, 23, 24, 25, 26, 27, 28, 29, 30, 31, 32, 33, 34, 35, or 36 base pairs in length, such as about 15-30, 15-29, 15-28, 15-27, 15-26, 15-25, 15-24, 15-23, 15-22, 15-21, 15-20, 15-19, 15-18, 15-17, 18-30, 18-29, 18-28, 18-27, 18-26, 18-25, 18-24, 18-23, 18-22, 18-21, 18-20, 19-30, 19-29, 19-28, 19-27, 19-26, 19-25, 19-24, 19-23, 19-22, 19-21, 19-20, 20-30, 20-29, 20-28, 20-27, 20-26, 20-25, 20-24, 20-23, 20-22, 20-21, 21-30, 21-29, 21-28, 21-27, 21-26, 21-25, 21-24, 21-23, or 21-22 base pairs in length. In certain embodiments, the duplex region is 19-21 base pairs in length, e.g., 21 base pairs in length. Ranges and lengths intermediate to the above recited ranges and lengths are also contemplated to be part of the disclosure.

[0185] The two strands forming the duplex structure may be different portions of one larger RNA molecule, or they may be separate RNA molecules. Where the two strands are part of one larger molecule, and therefore are connected by an uninterrupted chain of nucleotides between the 3′-end of one strand and the 5′-end of the respective other strand forming the duplex structure, the connecting RNA chain is referred to as a “hairpin loop.” A hairpin loop can comprise at least one unpaired nucleotide. In some embodiments, the hairpin loop can comprise at least 4, at least 5, at least 6, at least 7, at least 8, at least 9, at least 10, at least 20, at least 23 or more unpaired nucleotides or nucleotides not directed to the target site of the dsRNA. In some embodiments, the hairpin loop can be 10 or fewer nucleotides. In some embodiments, the hairpin loop can be 8 or fewer unpaired nucleotides. In some embodiments, the hairpin loop can be 4-10 unpaired nucleotides. In some embodiments, the hairpin loop can be 4-8 nucleotides.

[0186] Where the two substantially complementary strands of a dsRNA are comprised by separate RNA molecules, those molecules need not, but can be covalently connected. In certain embodiments where the two strands are connected covalently by means other than an uninterrupted chain of nucleotides between the 3′-end of one strand and the 5′-end of the respective other strand forming the duplex structure, the connecting structure is referred to as a “linker” (though it is noted that certain other structures defined elsewhere herein can also be referred to as a “linker”). The RNA strands may have the same or a different number of nucleotides. The maximum number of base pairs is the number of nucleotides in the shortest strand of the dsRNA minus any overhangs that are present in the duplex. In addition to the duplex structure, an RNAi may comprise one or more nucleotide overhangs. In one embodiment of the RNAi agent, at least one strand comprises a 3′ overhang of at least 1 nucleotide. In another embodiment, at least one strand comprises a 3′ overhang of at least 2 nucleotides, e.g., 2, 3, 4, 5, 6, 7, 9, 10, 11, 12, 13, 14, or 15 nucleotides. In other embodiments, at least one strand of the RNAi agent comprises a 5′ overhang of at least 1 nucleotide. In certain embodiments, at least one strand comprises a 5′ overhang of at least 2 nucleotides, e.g., 2, 3, 4, 5, 6, 7, 9, 10, 11, 12, 13, 14, or 15 nucleotides. In still other embodiments, both the 3′ and the 5′ end of one strand of the RNAi agent comprise an overhang of at least 1 nucleotide.

[0187] In one embodiment, an RNAi agent of the disclosure is a dsRNA, each strand of which independently comprises 19-23 nucleotides, that interacts with a target RNA sequence, e.g., a MAPT target mRNA sequence, to direct the cleavage of the target RNA.

[0188] In some embodiments, an iRNA of the disclosure is a dsRNA of 24-30 nucleotides that interacts with a target RNA sequence, e.g., a MAPT target mRNA sequence, to direct the cleavage of the target RNA.

[0189] As used herein, the term “nucleotide overhang” refers to at least one unpaired nucleotide that protrudes from the duplex structure of an RNAi agent, e.g., a dsRNA. For example, when a 3′-end of one strand of a dsRNA extends beyond the 5′-end of the other strand, or vice versa, there is a nucleotide overhang. A dsRNA can comprise an overhang of at least one nucleotide; alternatively, the overhang can comprise at least two nucleotides, at least three nucleotides, at least four nucleotides, at least five nucleotides or more. A nucleotide overhang can comprise or consist of a nucleotide/nucleoside analog, including a deoxynucleotide/nucleoside. The overhang(s) can be on the sense strand, the antisense strand or any combination thereof. Furthermore, the nucleotide(s) of an overhang can be present on the 5′-end, 3′-end or both ends of either an antisense or sense strand of a dsRNA.

[0190] In one embodiment, the antisense strand of a dsRNA has a 1-10 nucleotide, e.g., a 1, 2, 3, 4, 5, 6, 7, 8, 9, or 10 nucleotide overhang at the 3′-end or the 5′-end. In one embodiment, the sense strand of a dsRNA has a 1-10 nucleotide, e.g., a 1, 2, 3, 4, 5, 6, 7, 8, 9, or 10 nucleotide overhang at the 3′-end or the 5′-end. In another embodiment, one or more of the nucleotides in the overhang is replaced with a nucleoside thiophosphate.

[0191] In certain embodiments, the antisense strand of a dsRNA has a 1-10 nucleotide, e.g., 0-3, 1-3, 2-4, 2-5, 4-10, 5-10, e.g., a 1, 2, 3, 4, 5, 6, 7, 8, 9, or 10 nucleotide overhang at the 3′-end or the 5′-end. In one embodiment, the sense strand of a dsRNA has a 1-10 nucleotide, e.g., a 1, 2, 3, 4, 5, 6, 7, 8, 9, or 10 nucleotide overhang at the 3′-end or the 5′-end. In another embodiment, one or more of the nucleotides in the overhang is replaced with a nucleoside thiophosphate.

[0192] In certain embodiments, the overhang on the sense strand or the antisense strand, can include extended lengths longer than 10 nucleotides, e.g., 1-30 nucleotides, 2-30 nucleotides, 10-30 nucleotides, or 10-15 nucleotides in length. In certain embodiments, an extended overhang is on the sense strand of the duplex. In certain embodiments, an extended overhang is present on the 3′end of the sense strand of the duplex. In certain embodiments, an extended overhang is present on the 5′end of the sense strand of the duplex. In certain embodiments, an extended overhang is on the antisense strand of the duplex. In certain embodiments, an extended overhang is present on the 3′end of the antisense strand of the duplex. In certain embodiments, an extended overhang is present on the 5′end of the antisense strand of the duplex. In certain embodiments, one or more of the nucleotides in the overhang is replaced with a nucleoside thiophosphate. In certain embodiments, the overhang includes a self-complementary portion such that the overhang is capable of forming a hairpin structure that is stable under physiological conditions.

[0193] The terms “blunt” or “blunt ended” as used herein in reference to a dsRNA mean that there are no unpaired nucleotides or nucleotide analogs at a given terminal end of a dsRNA, i.e., no nucleotide overhang. One or both ends of a dsRNA can be blunt. Where both ends of a dsRNA are blunt, the dsRNA is said to be blunt ended. To be clear, a “blunt ended” dsRNA is a dsRNA that is blunt at both ends, i.e., no nucleotide overhang at either end of the molecule. Most often such a molecule will be double stranded over its entire length.

[0194] The term “antisense strand” or “guide strand” refers to the strand of an RNAi agent, e.g., a dsRNA, which includes a region that is substantially complementary to a target sequence, e.g., a MAPT mRNA.

[0195] As used herein, the term “region of complementarity” refers to the region on the antisense strand that is substantially complementary to a sequence, for example a target sequence, e.g., a MAPT nucleotide sequence, as defined herein. Where the region of complementarity is not fully complementary to the target sequence, the mismatches can be in the internal or terminal regions of the molecule. Generally, the most tolerated mismatches are in the terminal regions, e.g., within 5, 4, 3, or 2 nucleotides of the 5′- or 3′-terminus of the RNAi agent. In some embodiments, a double stranded RNA agent of the disclosure includes a nucleotide mismatch in the antisense strand. In some embodiments, the antisense strand of the double stranded RNA agent of the disclosure includes no more than 4 mismatches with the target mRNA, e.g., the antisense strand includes 4, 3, 2, 1, or 0 mismatches with the target mRNA. In some embodiments, the antisense strand double stranded RNA agent of the disclosure includes no more than 4 mismatches with the sense strand, e.g., the antisense strand includes 4, 3, 2, 1, or 0 mismatches with the sense strand. In some embodiments, a double stranded RNA agent of the disclosure includes a nucleotide mismatch in the sense strand. In some embodiments, the sense strand of the double stranded RNA agent of the disclosure includes no more than 4 mismatches with the antisense strand, e.g., the sense strand includes 4, 3, 2, 1, or 0 mismatches with the antisense strand. In some embodiments, the nucleotide mismatch is, for example, within 5, 4, 3 nucleotides from the 3′-end of the iRNA. In another embodiment, the nucleotide mismatch is, for example, in the 3′-terminal nucleotide of the iRNA agent. In some embodiments, the mismatch(s) is not in the seed region.

[0196] Thus, an RNAi agent as described herein can contain one or more mismatches to the target sequence. In one embodiment, an RNAi agent as described herein contains no more than 3 mismatches (i.e., 3, 2, 1, or 0 mismatches). In one embodiment, an RNAi agent as described herein contains no more than 2 mismatches. In one embodiment, an RNAi agent as described herein contains no more than 1 mismatch. In one embodiment, an RNAi agent as described herein contains 0 mismatches. In certain embodiments, if the antisense strand of the RNAi agent contains mismatches to the target sequence, the mismatch can optionally be restricted to be within the last 5 nucleotides from either the 5′- or 3′-end of the region of complementarity. For example, in such embodiments, for a 23 nucleotide RNAi agent, the strand which is complementary to a region of a MAPT gene, generally does not contain any mismatch within the central 13 nucleotides. The methods described herein or methods known in the art can be used to determine whether an RNAi agent containing a mismatch to a target sequence is effective in inhibiting the expression of a 4R-tau isoform. For example, Jackson et al. (Nat. Biotechnol. 2003;21: 635-637) described an expression profile study where the expression of a small set of genes with sequence identity to the MAPK14 siRNA only at 12-18 nt of the sense strand, was down-regulated with similar kinetics to MAPK14. Similarly, Lin et al., (Nucleic Acids Res. 2005; 33(14): 4527-4535) using qPCR and reporter assays, showed that a 7 nt complementation between a siRNA and a target is sufficient to cause mRNA degradation of the target. Consideration of the efficacy of RNAi agents with mismatches in inhibiting expression of a 4R-tau isoform is important, especially if the particular region of complementarity in a MAPT gene is known to have polymorphic sequence variation within the population.

[0197] As used herein, “substantially all of the nucleotides are modified” are largely but not wholly modified and can include not more than 5, 4, 3, 2, or 1 unmodified nucleotide.

[0198] The term “sense strand” or “passenger strand” as used herein, refers to the strand of an RNAi agent that includes a region that is substantially complementary to a region of the antisense strand as that term is defined herein.

[0199] As used herein, the term “cleavage region” refers to a region that is located immediately adjacent to the cleavage site. The cleavage site is the site on the target at which cleavage occurs. In some embodiments, the cleavage region comprises three bases on either end of, and immediately adjacent to, the cleavage site. In some embodiments, the cleavage region comprises two bases on either end of, and immediately adjacent to, the cleavage site. In some embodiments, the cleavage site specifically occurs at the site bound by nucleotides 10 and 11 of the antisense strand, and the cleavage region comprises nucleotides 11, 12 and 13.

[0200] As used herein, and unless otherwise indicated, the term “complementary,” when used to describe a first nucleotide sequence in relation to a second nucleotide sequence, refers to the ability of an oligonucleotide or polynucleotide comprising the first nucleotide sequence to hybridize and form a duplex structure under certain conditions with an oligonucleotide or polynucleotide comprising the second nucleotide sequence, as will be understood by the skilled person. Such conditions can be, for example, “stringent conditions”, including but not limited to, 400 mM NaCl, 40 mM PIPES pH 6.4, 1 mM EDTA, 50° C. or 70° C. for 12-16 hours followed by washing (see, e.g., “Molecular Cloning: A Laboratory Manual, Sambrook, et al. (1989) Cold Spring Harbor Laboratory Press). As used herein, “stringent conditions” or “stringent hybridization conditions” refers to conditions under which an antisense compound will hybridize to its target sequence, but to a minimal number of other sequences. Stringent conditions are sequence-dependent and will be different in different circumstances, and “stringent conditions” under which antisense compounds hybridize to a target sequence are determined by the nature and composition of the antisense compounds and the assays in which they are being investigated. Other conditions, such as physiologically relevant conditions as can be encountered inside an organism, can apply. The skilled person will be able to determine the set of conditions most appropriate for a test of complementarity of two sequences in accordance with the ultimate application of the hybridized nucleotides.

[0201] Complementary sequences within an RNAi agent, e.g., within a dsRNA as described herein, include base-pairing of the oligonucleotide or polynucleotide comprising a first nucleotide sequence to an oligonucleotide or polynucleotide comprising a second nucleotide sequence over the entire length of one or both nucleotide sequences. Such sequences can be referred to as “fully complementary” with respect to each other herein. However, where a first sequence is referred to as “substantially complementary” with respect to a second sequence herein, the two sequences can be fully complementary, or they can form one or more, but generally not more than 5, 4, 3 or 2 mismatched base pairs upon hybridization for a duplex up to 30 base pairs. In some embodiments, the “substantially complementary” sequences disclosed herein comprise a contiguous nucleotide sequence which is at least about 80% complementary over its entire length to the equivalent region of the target exon 10-MAPT sequence, such as about 85%, about 90%, about 91%, about 92%, about 93%, about 94%, about 95%, about 96%, about 97%, about 98%, or about 99% complementary. However, where two oligonucleotides are designed to form, upon hybridization, one or more single stranded overhangs, such overhangs shall not be regarded as mismatches with regard to the determination of complementarity. For example, a dsRNA comprising one oligonucleotide 21 nucleotides in length and another oligonucleotide 23 nucleotides in length, wherein the longer oligonucleotide comprises a sequence of 21 nucleotides that is fully complementary to the shorter oligonucleotide, can yet be referred to as “fully complementary” for the purposes described herein.

[0202] “Complementary” sequences, as used herein, can also include, or be formed entirely from, non-Watson-Crick base pairs or base pairs formed from non-natural and modified nucleotides, in so far as the above requirements with respect to their ability to hybridize are fulfilled. Such non-Watson-Crick base pairs include, but are not limited to, G:U Wobble or Hoogstein base pairing.

[0203] The terms “complementary,” “fully complementary” and “substantially complementary” herein can be used with respect to the base matching between the sense strand and the antisense strand of a dsRNA, or between the antisense strand of an RNAi agent and a target sequence, as will be understood from the context of their use.

[0204] As used herein, a polynucleotide that is “substantially complementary to at least part of” a messenger RNA (mRNA) refers to a polynucleotide that is substantially complementary to a contiguous portion of the mRNA of interest (e.g., an mRNA encoding Tau). For example, a polynucleotide is complementary to at least a part of a MAPT mRNA if the sequence is substantially complementary to a non-interrupted portion of an mRNA encoding Tau.

[0205] Accordingly, in some embodiments, the antisense polynucleotides disclosed herein are fully complementary to the target MAPT sequence. In other embodiments, the antisense polynucleotides disclosed herein are substantially complementary to the target MAPT sequence and comprise a contiguous nucleotide sequence which is at least 80% complementary over its entire length to the equivalent region of the nucleotide sequence of the exon 10 hotspot (mapped to nucleotides 1007-1053 of SEQ ID NO: 3), or a fragment thereof, such as about 85%, about 90%, about 91%, about 92%, about 93%, about 94%, about 95%, about 96%, about 97%, about 98%, or about 99% complementary.

[0206] In some embodiments, the antisense polynucleotides disclosed herein are substantially complementary to a fragment of a target MAPT sequence and comprise a contiguous nucleotide sequence which is at least 80% complementary over its entire length to a fragment of SEQ ID NO: 3 selected from the group of nucleotides 1009-1029, 1010-1030, 1011-1031, 1012-1032, 1013-1033, 1014-1034, 1015-1035, 1016-1036, 1017-1037, 1018-1038, 1019-1039, 1020-1040, 1021-1041, 1022-1042, 1023-1043, 1024-1044, 1025-1045, 1026-1046, 1027-1047, 1028-1048, 1029-1049, 1030-1050, 1031-1051, 1032-1052, 1033-1053, 1014-1048, and 1022-1048 of SEQ ID NO: 3, such as about 85%, about 90%, about 91%, about 92%, about 93%, about 94%, about 95%, about 96%, about 97%, about 98%, or about 99% complementary. Ranges intermediate to the above recited ranges are also contemplated to be part of the disclosure. In certain embodiments, the antisense polynucleotides disclosed herein are substantially complementary to a fragment of a target MAPT sequence and comprise a contiguous nucleotide sequence which is at least 80% complementary over its entire length to a fragment of SEQ ID NO: 3 selected from the group of nucleotides 1009-1029, 1016-1036, 1018-1038, 1020-1040, 1021-1041, 1022-1042, 1024-1044, 1027-1047, 1028-1048, 1029-1049, 1030-1050, 1032-1052, 1033-1053, 1014-1048, and 1022-1048 of SEQ ID NO: 3, such as about 85%, about 90%, about 91%, about 92%, about 93%, about 94%, about 95%, about 96%, about 97%, about 98%, or about 99% complementary.

[0207] In other embodiments, the antisense polynucleotides disclosed herein are substantially complementary to the target MAPT sequence and comprise a contiguous nucleotide sequence which is at least about 80% complementary over its entire length to any one of the sense strand nucleotide sequences in Table 7 or 8, or a fragment of any one of the sense strand nucleotide sequences in Table 7 or 8, such as about 85%, about 90%, about 91%, about 92%, about 93%, about 94%, about 95%, about 96%, about 97%, about 98%, about 99%, or 100% complementary.

[0208] In one embodiment, an RNAi agent of the disclosure includes a sense strand that is substantially complementary to an antisense polynucleotide which, in turn, is complementary to a target MAPT sequence, and wherein the sense strand polynucleotide comprises a contiguous nucleotide sequence which is at least about 80% complementary over its entire length to the equivalent region of the nucleotide sequence of nucleotides 1007-1053 of SEQ ID NO: 4, or a fragment thereof, such as about 85%, about 90%, about 91%, about 92%, about 93%, about 94%, about 95%, about 96%, about 97%, about 98%, about 99%, or 100% complementary. In some embodiments, an iRNA of the disclosure includes a sense strand that is substantially complementary to an antisense polynucleotide which, in turn, is complementary to a target MAPT sequence, and wherein the sense strand polynucleotide comprises a contiguous nucleotide sequence which is at least about 80% complementary over its entire length to any one of the antisense strand nucleotide sequences in Table 7 or 8, or a fragment of any one of the antisense strand nucleotide sequences in Table 7 or 8, such as about 85%, about 90%, about 91%, about 92%, about 93%, about 94%, about 95%, about 96%, about 97%, about 98%, about 99%, or 100% complementary.

[0209] In certain embodiments, the sense and antisense strands are selected from any one of duplexes AD-1423276, AD-1423277, AD-1423278, AD-1423279, AD-1423280, AD-1423281, AD-1423282, AD-1423283, AD-1423284, AD-1423285, AD-1423286, AD-1423287, AD-1423288, AD-1423289, AD-1423290, AD-1423291, AD-1423292, AD-1423293, AD-1423294, AD-1423295, AD-1423296, AD-1423297, AD-1423298, AD-1423299, and AD-1423300. In particular embodiments, the sense and antisense strands are selected from any one of duplexes AD-1423276, AD-1423283, AD-1423285, AD-1423287, AD-1423288, AD-1423289, AD-1423291, AD-1423294, AD-1423295, AD-1423296, AD-1423297, AD-1423299, and AD-1423300. In further specific embodiments, the sense and antisense strands are selected from any one of duplexes AD-1423283, AD-1423291, AD-1423294, and AD-1423295.

[0210] In one embodiment, at least partial suppression of the expression of a 4R-tau isoform, is assessed by a reduction of the amount of 4R-tau mRNA, e.g., sense mRNA, antisense mRNA, total 4R-tau mRNA, which can be isolated from or detected in a first cell or group of cells in which a MAPT gene is transcribed and which has or have been treated such that the expression of a 4R-tau isoform is inhibited, as compared to a second cell or group of cells substantially identical to the first cell or group of cells but which has or have not been so treated (control cells). The degree of inhibition may be expressed in terms of:

$$\frac{( mRNA in control cells ) - ( mRNA in treated cells )}{( mRNA in control cells )} \times 100$$

[0211] The phrase “contacting a cell with an RNAi agent,” such as a dsRNA, as used herein, includes contacting a cell by any possible means. Contacting a cell with an RNAi agent includes contacting a cell in vitro with the RNAi agent or contacting a cell in vivo with the RNAi agent. The contacting may be done directly or indirectly. Thus, for example, the RNAi agent may be put into physical contact with the cell by the individual performing the method, or alternatively, the RNAi agent may be put into a situation that will permit or cause it to subsequently come into contact with the cell.

[0212] Contacting a cell in vitro may be done, for example, by incubating the cell with the RNAi agent. Contacting a cell in vivo may be done, for example, by injecting the RNAi agent into or near the tissue where the cell is located, or by injecting the RNAi agent into another area, e.g., the central nervous system (CNS), optionally via intrathecal, intravitreal, intracisternal or other injection, or to the bloodstream or the subcutaneous space, such that the agent will subsequently reach the tissue where the cell to be contacted is located. For example, the RNAi agent may contain or be coupled to a ligand, e.g., a lipophilic moiety or moieties as described below and further detailed, e.g., in PCT/US2019/031170, which is incorporated herein by reference, that directs or otherwise stabilizes the RNAi agent at a site of interest, e.g., the CNS. Combinations of in vitro and in vivo methods of contacting are also possible. For example, a cell may also be contacted in vitro with an RNAi agent and subsequently transplanted into a subject.

[0213] In one embodiment, contacting a cell with an RNAi agent includes “introducing” or “delivering the RNAi agent into the cell” by facilitating or effecting uptake or absorption into the cell. Absorption or uptake of an RNAi agent can occur through unaided diffusive or active cellular processes, or by auxiliary agents or devices. Introducing an RNAi agent into a cell may be in vitro or in vivo. For example, for in vivo introduction, an RNAi agent can be injected into a tissue site or administered systemically. In vitro introduction into a cell includes methods known in the art such as electroporation and lipofection. Further approaches are described herein below or are known in the art.

[0214] The term “lipophile” or “lipophilic moiety” broadly refers to any compound or chemical moiety having an affinity for lipids. One way to characterize the lipophilicity of the lipophilic moiety is by the octanol-water partition coefficient, logK_{ow}, where K_{ow} is the ratio of a chemical's concentration in the octanol-phase to its concentration in the aqueous phase of a two-phase system at equilibrium. The octanol-water partition coefficient is a laboratory-measured property of a substance. However, it may also be predicted by using coefficients attributed to the structural components of a chemical which are calculated using first-principle or empirical methods (see, for example, Tetko et al., J. Chem. Inf Comput. Sci. 41:1407-21 (2001), which is incorporated herein by reference in its entirety). It provides a thermodynamic measure of the tendency of the substance to prefer a non-aqueous or oily milieu rather than water (i.e. its hydrophilic/lipophilic balance). In principle, a chemical substance is lipophilic in character when its logK_{ow} exceeds 0. Typically, the lipophilic moiety possesses a logK_{ow} exceeding 1, exceeding 1.5, exceeding 2, exceeding 3, exceeding 4, exceeding 5, or exceeding 10. For instance, the logK_{ow} of 6-amino hexanol, for instance, is predicted to be approximately 0.7. Using the same method, the logK_{ow} of cholesteryl N-(hexan-6-ol) carbamate is predicted to be 10.7.

[0215] The lipophilicity of a molecule can change with respect to the functional group it carries. For instance, adding a hydroxyl group or amine group to the end of a lipophilic moiety can increase or decrease the partition coefficient (e.g., logK_{ow}) value of the lipophilic moiety.

[0216] Alternatively, the hydrophobicity of the double-stranded RNAi agent, conjugated to one or more lipophilic moieties, can be measured by its protein binding characteristics. For instance, in certain embodiments, the unbound fraction in the plasma protein binding assay of the double-stranded RNAi agent could be determined to positively correlate to the relative hydrophobicity of the double-stranded RNAi agent, which could then positively correlate to the silencing activity of the double-stranded RNAi agent.

[0217] In one embodiment, the plasma protein binding assay determined is an electrophoretic mobility shift assay (EMSA) using human serum albumin protein. An exemplary protocol of this binding assay is illustrated in detail in, e.g., PCT/US2019/031170. Briefly, duplexes were incubated with human serum albumin and the unbound fraction was determined. Exemplary assay protocol includes duplexes at a stock concentration of 10 μM, diluted to a final concentration of 0.5 μM (20 μL total volume) containing 0, 20, or 90% serum in 1×PBS. The samples can be mixed, centrifuged for 30 seconds, and subsequently incubated at room temperature for 10 minutes. Once incubation step is completed, 4 μL of 6×EMSA Gel-loading solution can be added to each sample, centrifuged for 30 seconds, and 12 μL of each sample can be loaded onto a 26 well BioRad 10% PAGE (polyacrylamide gel electrophoresis). The gel can be run for 1 hour at 100 volts. After completion of the run, the gel is removed from the casing and washed in 50 mL of 10% TBE (Tris base, boric acid and EDTA). Once washing is complete, 5 μL of SYBR Gold can be added to the gel, which is then allowed to incubate at room temperature for 10 minutes, and the gel-washed again in 50 mL of 10% TBE. In this exemplary assay, a Gel Doc XR+ gel documentation system may be used to read the gel using the following parameters: the imaging application set to SYBR Gold, the size set to Bio-Rad criterion gel, the exposure set to automatic for intense bands, the highlight saturated pixels may be turned one and the color is set to gray. The detection, molecular weight analysis, and output can all disabled. Once a clean photo of the gel is obtained Image Lab 5.2 may be used to process the image. The lanes and bands can be manually set to measure band intensity. Band intensities of each sample can be normalized to PBS to obtain the fraction of unbound siRNA. From this measurement relative hydrophobicity can determined. The hydrophobicity of the double-stranded RNAi agent, measured by fraction of unbound siRNA in the binding assay, exceeds 0.15, exceeds 0.2, exceeds 0.25, exceeds 0.3, exceeds 0.35, exceeds 0.4, exceeds 0.45, or exceeds 0.5 for an enhanced in vivo delivery of siRNA.

[0218] Accordingly, conjugating the lipophilic moieties to the internal position(s) of the double-stranded RNAi agent provides optimal hydrophobicity for the enhanced in vivo delivery of siRNA.

[0219] The term “lipid nanoparticle” or “LNP” is a vesicle comprising a lipid layer encapsulating a pharmaceutically active molecule, such as a nucleic acid molecule, e.g., a RNAi agent or a plasmid from which an RNAi agent is transcribed. LNPs are described in, for example, U.S. Pat. Nos. 6,858,225, 6,815,432, 8,158,601, and 8,058,069, the entire contents of which are hereby incorporated herein by reference.

[0220] As used herein, a “subject” is an animal, such as a mammal, including a primate (such as a human, a non-human primate, e.g., a monkey, and a chimpanzee), or a non-primate (such as a rat, or a mouse). In a preferred embodiment, the subject is a human, such as a human being treated or assessed for a disease, disorder, or condition that would benefit from reduction in 4R-tau expression; a human at risk for a disease, disorder, or condition that would benefit from reduction in 4R-tau expression; a human having a disease, disorder, or condition that would benefit from reduction in 4R-tau expression; or human being treated for a disease, disorder, or condition that would benefit from reduction in 4R-tau expression as described herein. In some embodiments, the subject is a female human. In other embodiments, the subject is a male human. In one embodiment, the subject is an adult subject. In one embodiment, the subject is a pediatric subject. In another embodiment, the subject is a juvenile subject, i.e., a subject below 20 years of age.

[0221] As used herein, the terms “treating” or “treatment” refer to a beneficial or desired result including, but not limited to, alleviation or amelioration of one or more signs or symptoms associated with 4R-tau expression or 4R-tau production in 4R-tau-associated diseases, such as 4R-tauopathies, e.g., PSP, CBD, AGD, MSTD, GGT, spAD, or rpAD. “Treatment” can also mean prolonging survival as compared to expected survival in the absence of treatment.

[0222] The term “lower” in the context of the level of 4R-tau in a subject or a disease marker or symptom refers to a statistically significant decrease in such level. The decrease can be, for example, at least 10%, 15%, 20%, 25%, 30%, %, 40%, 45%, 50%, 55%, 60%, 65%, 70%, 75%, 80%, 85%, 90%, 95%, or more. In certain embodiments, a decrease is at least 20%. In certain embodiments, the decrease is at least 50% in a disease marker, e.g., the level of sense- or antisense-containing foci and/or the level of aberrant dipeptide repeat protein, e.g., a decrease of 50%, 55%, 60%, 65%, 70%, 75%, 80%, 85%, 90%, 95%, or more. In some embodiments, a decrease is at least about 25% in a disease marker, e.g., 4R-tau protein and/or gene expression level is decreased by, e.g., at least about 25%, at least about 30%, at least about 40%, at least about 50%, at least about 60%, at least about 70%, at least about 80%, at least about 90%, or at least about 95% “Lower” in the context of the level of 4R-tau in a subject is preferably down to a level accepted as within the range of normal for an individual without such disorder. In certain embodiments, “lower” is the decrease in the difference between the level of a marker or symptom for a subject suffering from a disease and a level accepted within the range of normal for an individual, e.g., the level of decrease in bodyweight between an obese individual and an individual having a weight accepted within the range of normal.

[0223] As used herein, “prevention” or “preventing,” when used in reference to a disease, disorder, or condition thereof, that would benefit from a reduction in expression of a 4R-tau isoform or production of a 4R-tau, refers to a reduction in the likelihood that a subject will develop a symptom associated with such a disease, disorder, or condition, e.g., a symptom of a 4R-tau-associated disease. The failure to develop a disease, disorder, or condition, or the reduction in the development of a symptom associated with such a disease, disorder, or condition (e.g., by at least about 10% on a clinically accepted scale for that disease or disorder), or the exhibition of delayed symptoms delayed (e.g., by days, weeks, months or years) is considered effective prevention.

[0224] As used herein, the term “4R-tau-associated disease” or “4R-tau-associated disorder” includes any disease or disorder that would benefit from reduction in the expression and/or activity of a 4R-tau isoform. Exemplary 4R-tau diseases include 4R-tauopathies. As used herein, a “4R-tauopathy” is a tauopathy characterized by the aggregation of tau protein in which the 4R-tau isoform is the primary or predominant Tau isoform. 4R-tauopathies include, but are not limited to, progressive supranuclear palsy (PSP), corticobasal syndrome (CBD), argyrophilic grain disease (AGD), multiple system tauopathy with presensile dementia (MSTD), globular glial tauopathy (GGT), sporadic (spAD) Alzheimer's disease, and rapidly progressive (rpAD) Alzheimer's disease.

[0225] “Therapeutically effective amount,” as used herein, is intended to include the amount of an RNAi agent that, when administered to a subject having a 4R-tau-associated disease, is sufficient to effect treatment of the disease (e.g., by diminishing, ameliorating, or maintaining the existing disease or one or more symptoms of disease). The “therapeutically effective amount” may vary depending on the RNAi agent, how the agent is administered, the disease and its severity and the history, age, weight, family history, genetic makeup, the types of preceding or concomitant treatments, if any, and other individual characteristics of the subject to be treated.

[0226] “Prophylactically effective amount,” as used herein, is intended to include the amount of an RNAi agent that, when administered to a subject having a 4R-tau-associated disorder, is sufficient to prevent or ameliorate the disease or one or more symptoms of the disease. Ameliorating the disease includes slowing the course of the disease or reducing the severity of later-developing disease. The “prophylactically effective amount” may vary depending on the RNAi agent, how the agent is administered, the degree of risk of disease, and the history, age, weight, family history, genetic makeup, the types of preceding or concomitant treatments, if any, and other individual characteristics of the patient to be treated.

[0227] A “therapeutically-effective amount” or “prophylactically effective amount” also includes an amount of an RNAi agent that produces some desired local or systemic effect at a reasonable benefit/risk ratio applicable to any treatment. An RNAi agent employed in the methods of the present disclosure may be administered in a sufficient amount to produce a reasonable benefit/risk ratio applicable to such treatment.

[0228] The phrase “pharmaceutically acceptable” is employed herein to refer to those compounds, materials, compositions, or dosage forms which are, within the scope of sound medical judgment, suitable for use in contact with the tissues of human subjects and animal subjects without excessive toxicity, irritation, allergic response, or other problem or complication, commensurate with a reasonable benefit/risk ratio.

[0229] The phrase “pharmaceutically-acceptable carrier” as used herein means a pharmaceutically-acceptable material, composition or vehicle, such as a liquid or solid filler, diluent, excipient, manufacturing aid (e.g., lubricant, talc magnesium, calcium or zinc stearate, or steric acid), or solvent encapsulating material, involved in carrying or transporting the subject compound from one organ, or portion of the body, to another organ, or portion of the body. Each carrier must be “acceptable” in the sense of being compatible with the other ingredients of the formulation and not injurious to the subject being treated. Some examples of materials which can serve as pharmaceutically-acceptable carriers include: (1) sugars, such as lactose, glucose and sucrose; (2) starches, such as corn starch and potato starch; (3) cellulose, and its derivatives, such as sodium carboxymethyl cellulose, ethyl cellulose and cellulose acetate; (4) powdered tragacanth; (5) malt; (6) gelatin; (7) lubricating agents, such as magnesium state, sodium lauryl sulfate and talc; (8) excipients, such as cocoa butter and suppository waxes; (9) oils, such as peanut oil, cottonseed oil, safflower oil, sesame oil, olive oil, corn oil and soybean oil; (10) glycols, such as propylene glycol; (11) polyols, such as glycerin, sorbitol, mannitol and polyethylene glycol; (12) esters, such as ethyl oleate and ethyl laurate; (13) agar; (14) buffering agents, such as magnesium hydroxide and aluminum hydroxide; (15) alginic acid; (16) pyrogen-free water; (17) isotonic saline; (18) Ringer's solution; (19) ethyl alcohol; (20) pH buffered solutions; (21) polyesters, polycarbonates or polyanhydrides; (22) bulking agents, such as polypeptides and amino acids (23) serum component, such as serum albumin, HDL and LDL; and (22) other non-toxic compatible substances employed in pharmaceutical formulations.

[0230] The term “sample,” as used herein, includes a collection of similar fluids, cells, or tissues isolated from a subject, as well as fluids, cells, or tissues present within a subject. Examples of biological fluids include blood, serum and serosal fluids, plasma, cerebrospinal fluid, ocular fluids, lymph, urine, saliva, and the like. Tissue samples may include samples from tissues, organs or localized regions. For example, samples may be derived from particular organs, parts of organs, or fluids or cells within those organs. In certain embodiments, samples may be derived from the brain (e.g., whole brain or certain segments of brain, e.g., striatum, or certain types of cells in the brain, such as, e.g., neurons and glial cells (astrocytes, oligodendrocytes, microglial cells)). In some embodiments, a “sample derived from a subject” refers to blood drawn from the subject or plasma or serum derived therefrom. In further embodiments, a “sample derived from a subject” refers to brain tissue (or subcomponents thereof) or retinal tissue (or subcomponents thereof) derived from the subject.

[0231] The term “substituted” refers to the replacement of one or more hydrogen radicals in a given structure with the radical of a specified substituent including, but not limited to: alkyl, alkenyl, alkynyl, aryl, heterocyclyl, halo, thiol, alkylthio, arylthio, alkylthioalkyl, arylthioalkyl, alkylsulfonyl, alkylsulfonylalkyl, arylsulfonylalkyl, alkoxy, aryloxy, aralkoxy, aminocarbonyl, alkylaminocarbonyl, arylaminocarbonyl, alkoxycarbonyl, aryloxycarbonyl, haloalkyl, amino, trifluoromethyl, cyano, nitro, alkylamino, arylamino, alkylaminoalkyl, arylaminoalkyl, aminoalkylamino, hydroxy, alkoxyalkyl, carboxyalkyl, alkoxycarbonylalkyl, aminocarbonylalkyl, acyl, aralkoxycarbonyl, carboxylic acid, sulfonic acid, sulfonyl, phosphonic acid, aryl, heteroaryl, heterocyclic, and aliphatic. It is understood that the substituent can be further substituted.

[0232] The term “alkyl” refers to saturated and unsaturated non-aromatic hydrocarbon chains that may be a straight chain or branched chain, containing the indicated number of carbon atoms (these include without limitation propyl, allyl, or propargyl), which may be optionally inserted with N, O, or S. For example, “(C1-C6) alkyl” means a radical having from 16 carbon atoms in a linear or branched arrangement. “(C1-C6) alkyl” includes, for example, methyl, ethyl, propyl, iso-propyl, n-butyl, tert-butyl, pentyl and hexyl. In certain embodiments, a lipophilic moiety of the instant disclosure can include a C6-C18 alkyl hydrocarbon chain.

[0233] The term “alkylene” refers to an optionally substituted saturated aliphatic branched or straight chain divalent hydrocarbon radical having the specified number of carbon atoms. For example, “(C1-C6) alkylene” means a divalent saturated aliphatic radical having from 1-6 carbon atoms in a linear arrangement, e.g., [(CH₂)ₙ], where n is an integer from 1 to 6. “(C1-C6) alkylene” includes methylene, ethylene, propylene, butylene, pentylene and hexylene. Alternatively, “(C1-C6) alkylene” means a divalent saturated radical having from 1-6 carbon atoms in a branched arrangement, for example: [(CH₂CH₂CH₂CH₂CH(CH₃)], [(CH₂CH₂CH₂CH₂C(CH₃)₂], [(CH₂C(CH₃)₂CH(CH₃))], and the like. The term “alkylenedioxo” refers to a divalent species of the structure —O—R—O—, in which R represents an alkylene.

[0234] The term “mercapto” refers to an —SH radical. The term “thioalkoxy” refers to an —S— alkyl radical.

[0235] The term “halo” refers to any radical of fluorine, chlorine, bromine or iodine. “Halogen” and “halo” are used interchangeably herein.

[0236] As used herein, the term “cycloalkyl” means a saturated or unsaturated nonaromatic hydrocarbon ring group having from 3 to 14 carbon atoms, unless otherwise specified. For example, “(C3-C10) cycloalkyl” means a hydrocarbon radical of a (3-10)-membered saturated aliphatic cyclic hydrocarbon ring. Examples of cycloalkyl groups include, but are not limited to, cyclopropyl, methyl-cyclopropyl, 2,2-dimethyl-cyclobutyl, 2-ethyl-cyclopentyl, cyclohexyl, etc. Cycloalkyls may include multiple spiro- or fused rings. Cycloalkyl groups are optionally mono-, di-, tri-, tetra-, or penta-substituted on any position as permitted by normal valency.

[0237] As used herein, the term “alkenyl” refers to a non-aromatic hydrocarbon radical, straight or branched, containing at least one carbon-carbon double bond, and having from 2 to 10 carbon atoms unless otherwise specified. Up to five carbon-carbon double bonds may be present in such groups. For example, “C2-C6” alkenyl is defined as an alkenyl radical having from 2 to 6 carbon atoms. Examples of alkenyl groups include, but are not limited to, ethenyl, propenyl, butenyl, and cyclohexenyl. The straight, branched, or cyclic portion of the alkenyl group may contain double bonds and is optionally mono-, di-, tri-, tetra-, or penta-substituted on any position as permitted by normal valency. The term “cycloalkenyl” means a monocyclic hydrocarbon group having the specified number of carbon atoms and at least one carbon-carbon double bond.

[0238] As used herein, the term “alkynyl” refers to a hydrocarbon radical, straight or branched, containing from 2 to 10 carbon atoms, unless otherwise specified, and containing at least one carbon-carbon triple bond. Up to 5 carbon-carbon triple bonds may be present. Thus, “C2-C6 alkynyl” means an alkynyl radical having from 2 to 6 carbon atoms. Examples of alkynyl groups include, but are not limited to, ethynyl, 2-propynyl, and 2-butynyl. The straight or branched portion of the alkynyl group may contain triple bonds as permitted by normal valency, and may be optionally mono-, di-, tri-, tetra-, or penta-substituted on any position as permitted by normal valency.

[0239] As used herein, “alkoxyl” or “alkoxy” refers to an alkyl group as defined above with the indicated number of carbon atoms attached through an oxygen bridge. For example, “(C1-C3)alkoxy” includes methoxy, ethoxy and propoxy. For example, “(C1-C6)alkoxy”, is intended to include C1, C2, C3, C4, C5, and C6 alkoxy groups. For example, “(C1-C8)alkoxy”, is intended to include C1, C2, C3, C4, C5, C6, C7, and C8 alkoxy groups. Examples of alkoxy include, but are not limited to, methoxy, ethoxy, n-propoxy, i-propoxy, n-butoxy, s-butoxy, t-butoxy, n-pentoxy, s-pentoxy, n-heptoxy, and n-octoxy. “Alkylthio” means an alkyl radical attached through a sulfur linking atom. The terms “alkylamino” or “aminoalkyl”, means an alkyl radical attached through an NH linkage. “Dialkylamino” means two alkyl radical attached through a nitrogen linking atom. The amino groups may be unsubstituted, monosubstituted, or di-substituted. In some embodiments, the two alkyl radicals are the same (e.g., N,N-dimethylamino). In some embodiments, the two alkyl radicals are different (e.g., N-ethyl-N-methylamino).

[0240] As used herein, “aryl” or “aromatic” means any stable monocyclic or polycyclic carbon ring of up to 7 atoms in each ring, wherein at least one ring is aromatic. Examples of aryl groups include, but are not limited to, phenyl, naphthyl, anthracenyl, tetrahydronaphthyl, indanyl, and biphenyl. In cases where the aryl substituent is bicyclic and one ring is non-aromatic, it is understood that attachment is via the aromatic ring. Aryl groups are optionally mono-, di-, tri-, tetra-, or penta-substituted on any position as permitted by normal valency. The term “arylalkyl” or the term “aralkyl” refers to alkyl substituted with an aryl. The term “arylalkoxy” refers to an alkoxy substituted with aryl.

[0241] “Hetero” refers to the replacement of at least one carbon atom in a ring system with at least one heteroatom selected from N, S and O. “Hetero” also refers to the replacement of at least one carbon atom in an acyclic system. A hetero ring system or a hetero acyclic system may have, for example, 1, 2 or 3 carbon atoms replaced by a heteroatom.

[0242] As used herein, the term “heteroaryl” represents a stable monocyclic or polycyclic ring of up to 7 atoms in each ring, wherein at least one ring is aromatic and contains from 1 to 4 heteroatoms selected from the group consisting of O, N and S. Examples of heteroaryl groups include, but are not limited to, acridinyl, carbazolyl, cinnolinyl, quinoxalinyl, pyrrazolyl, indolyl, benzotriazolyl, furanyl, thienyl, benzothienyl, benzofuranyl, benzimidazolonyl, benzoxazolonyl, quinolinyl, isoquinolinyl, dihydroisoindolonyl, imidazopyridinyl, isoindolonyl, indazolyl, oxazolyl, oxadiazolyl, isoxazolyl, indolyl, pyrazinyl, pyridazinyl, pyridinyl, pyrimidinyl, pyrrolyl, tetrahydroquinoline. “Heteroaryl” is also understood to include the N-oxide derivative of any nitrogen-containing heteroaryl. In cases where the heteroaryl substituent is bicyclic and one ring is non-aromatic or contains no heteroatoms, it is understood that attachment is via the aromatic ring or via the heteroatom containing ring. Heteroaryl groups are optionally mono-, di-, tri-, tetra-, or penta-substituted on any position as permitted by normal valency.

[0243] As used herein, the term “heterocycle,” “heterocyclic,” or “heterocyclyl” means a 3- to 14-membered aromatic or nonaromatic heterocycle containing from 1 to 4 heteroatoms selected from the group consisting of O, N and S, including polycyclic groups. As used herein, the term “heterocyclic” is also considered to be synonymous with the terms “heterocycle” and “heterocyclyl” and is understood as also having the same definitions set forth herein. “Heterocyclyl” includes the above mentioned heteroaryls, as well as dihydro and tetrahydro analogs thereof. Examples of heterocyclyl groups include, but are not limited to, azetidinyl, benzoimidazolyl, benzofuranyl, benzofurazanyl, benzopyrazolyl, benzotriazolyl, benzothiophenyl, benzoxazolyl, carbazolyl, carbolinyl, cinnolinyl, furanyl, imidazolyl, indolinyl, indolyl, indolazinyl, indazolyl, isobenzofuranyl, isoindolyl, isoquinolyl, isothiazolyl, isoxazolyl, naphthpyridinyl, oxadiazolyl, oxooxazolidinyl, oxazolyl, oxazoline, oxopiperazinyl, oxopyrrolidinyl, oxomorpholinyl, isoxazoline, oxetanyl, pyranyl, pyrazinyl, pyrazolyl, pyridazinyl, pyridopyridinyl, pyridazinyl, pyridyl, pyridinonyl, pyrimidyl, pyrimidinonyl, pyrrolyl, quinazolinyl, quinolyl, quinoxalinyl, tetrahydropyranyl, tetrahydrofuranyl, tetrahydrothiopyranyl, tetrahydroisoquinolinyl, tetrazolyl, tetrazolopyridyl, thiadiazolyl, thiazolyl, thienyl, triazolyl, 1,4-dioxanyl, hexahydroazepinyl, piperazinyl, piperidinyl, pyridin-2-onyl, pyrrolidinyl, morpholinyl, thiomorpholinyl, dihydrobenzoimidazolyl, dihydrobenzofuranyl, dihydrobenzothiophenyl, dihydrobenzoxazolyl, dihydrofuranyl, dihydroimidazolyl, dihydroindolyl, dihydroisooxazolyl, dihydroisothiazolyl, dihydrooxadiazolyl, dihydrooxazolyl, dihydropyrazinyl, dihydropyrazolyl, dihydropyridinyl, dihydropyrimidinyl, dihydropyrrolyl, dihydroquinolinyl, dihydrotetrazolyl, dihydrothiadiazolyl, dihydrothiazolyl, dihydrothienyl, dihydrotriazolyl, dihydroazetidinyl, dioxidothiomorpholinyl, methylenedioxybenzoyl, tetrahydrofuranyl, and tetrahydrothienyl, and N-oxides thereof. Attachment of a heterocyclyl substituent can occur via a carbon atom or via a heteroatom. Heterocyclyl groups are optionally mono-, di-, tri-, tetra-, or penta-substituted on any position as permitted by normal valency.

[0244] “Heterocycloalkyl” refers to a cycloalkyl residue in which one to four of the carbons is replaced by a heteroatom such as oxygen, nitrogen or sulfur. Examples of heterocycles whose radicals are heterocyclyl groups include tetrahydropyran, morpholine, pyrrolidine, piperidine, thiazolidine, oxazole, oxazoline, isoxazole, dioxane, tetrahydrofuran and the like.

[0245] The term “heteroaryl” refers to an aromatic 5-8 membered monocyclic, 8-12 membered bicyclic, or 11-14 membered tricyclic ring system having 1-3 heteroatoms if monocyclic, 1-6 heteroatoms if bicyclic, or 1-9 heteroatoms if tricyclic, said heteroatoms selected from O, N, or S (e.g., carbon atoms and 1-3, 1-6, or 1-9 heteroatoms of N, O, or S if monocyclic, bicyclic, or tricyclic, respectively), wherein 0, 1, 2, 3, or 4 atoms of each ring may be substituted by a substituent. Examples of heteroaryl groups include pyridyl, furyl or furanyl, imidazolyl, benzimidazolyl, pyrimidinyl, thiophenyl or thienyl, quinolinyl, indolyl, thiazolyl, and the like. The term “heteroarylalkyl” or the term “heteroaralkyl” refers to an alkyl substituted with a heteroaryl. The term “heteroarylalkoxy” refers to an alkoxy substituted with heteroaryl.

[0246] The term “cycloalkyl” as employed herein includes saturated and partially unsaturated cyclic hydrocarbon groups having 3 to 12 carbons, for example, 3 to 8 carbons, and, for example, 3 to 6 carbons, wherein the cycloalkyl group additionally may be optionally substituted. Cycloalkyl groups include, without limitation, cyclopropyl, cyclobutyl, cyclopentyl, cyclopentenyl, cyclohexyl, cyclohexenyl, cycloheptyl, and cyclooctyl.

[0247] The term “acyl” refers to an alkylcarbonyl, cycloalkylcarbonyl, arylcarbonyl, heterocyclylcarbonyl, or heteroarylcarbonyl substituent, any of which may be further substituted by substituents.

[0248] As used herein, “keto” refers to any alkyl, alkenyl, alkynyl, cycloalkyl, cycloalkenyl, heterocyclyl, heteroaryl, or aryl group as defined herein attached through a carbonyl bridge.

[0249] Examples of keto groups include, but are not limited to, alkanoyl (e.g., acetyl, propionyl, butanoyl, pentanoyl, hexanoyl), alkenoyl (e.g., acryloyl) alkynoyl (e.g., ethynoyl, propynoyl, butynoyl, pentynoyl, hexynoyl), aryloyl (e.g., benzoyl), heteroaryloyl (e.g., pyrroloyl, imidazoloyl, quinolinoyl, pyridinoyl).

[0250] As used herein, “alkoxycarbonyl” refers to any alkoxy group as defined above attached through a carbonyl bridge (i.e., —C(O)O-alkyl). Examples of alkoxycarbonyl groups include, but are not limited to, methoxycarbonyl, ethoxycarbonyl, iso-propoxycarbonyl, n-propoxycarbonyl, t-butoxycarbonyl, benzyloxycarbonyl or n-pentoxycarbonyl.

[0251] As used herein, “aryloxycarbonyl” refers to any aryl group as defined herein attached through an oxycarbonyl bridge (i.e., —C(O)O-aryl). Examples of aryloxycarbonyl groups include, but are not limited to, phenoxycarbonyl and naphthyloxycarbonyl.

[0252] As used herein, “heteroaryloxycarbonyl” refers to any heteroaryl group as defined herein attached through an oxycarbonyl bridge (i.e., —C(O)O-heteroaryl). Examples of heteroaryloxycarbonyl groups include, but are not limited to, 2-pyridyloxycarbonyl, 2-oxazolyloxycarbonyl, 4-thiazolyloxycarbonyl, or pyrimidinyloxycarbonyl.

[0253] The term “oxo” refers to an oxygen atom, which forms a carbonyl when attached to carbon, an N-oxide when attached to nitrogen, and a sulfoxide or sulfone when attached to sulfur.

[0254] The person of ordinary skill in the art would readily understand and appreciate that the compounds and compositions disclosed herein may have certain atoms (e.g., N, O, or S atoms) in a protonated or deprotonated state, depending upon the environment in which the compound or composition is placed. Accordingly, as used herein, the structures disclosed herein envisage that certain functional groups, such as, for example, OH, SH, or NH, may be protonated or deprotonated. The disclosure herein is intended to cover the disclosed compounds and compositions regardless of their state of protonation based on the pH of the environment, as would be readily understood by the person of ordinary skill in the art.

### II. RNAi Agents of the Disclosure

[0255] Described herein are RNAi agents which inhibit the expression of a 4R-tau isoform. In one embodiment, the RNAi agent includes double stranded ribonucleic acid (dsRNA) molecules for inhibiting the expression of 4R-tau in a cell, such as a cell within a subject, e.g., a mammal, such as a human having a 4R-tau-associated disease, such as a 4R-tauopathy, e.g., PSP, CBD, AGD, MSTD, GGT, spAD, or rpAD. The dsRNA includes an antisense strand having a region of complementarity which is complementary to at least a part of a hotspot within exon 10 in an mRNA formed in the expression of a 4R-tau isoform. The region of complementarity is about 15-30 nucleotides or less in length. Upon contact with a cell expressing the 4R-tau isoform, the RNAi agent inhibits the expression of 4R-tau isoforms (e.g., expressed by a human gene, a primate gene, a non-primate gene) by at least 25%, or higher as described herein, when compared to a similar cell not contacted with the RNAi agent or an RNAi agent not complementary to the MAPT gene. Expression of the 4R-tau isoform may be assayed by, for example, a PCR or branched DNA (bDNA)-based method, or by a protein-based method, such as by immunofluorescence analysis, using, for example, western blotting or flowcytometric techniques. In one embodiment, the level of knockdown is assayed in BE (2)-C cells using an assay method provided in Example 1 below. In some embodiments, the level of knockdown is assayed in primary mouse hepatocytes. In some embodiments, the level of knockdown is assayed in Neuro-2a cells.

[0256] A dsRNA includes two RNA strands that are complementary and hybridize to form a duplex structure under conditions in which the dsRNA will be used. One strand of a dsRNA (the antisense strand) includes a region of complementarity that is substantially complementary, and generally fully complementary, to a target sequence. The target sequence can be derived from the sequence of a hotspot within exon 10 in an mRNA formed during the expression of a 4R-tau isoform. The other strand (the sense strand) includes a region that is complementary to the antisense strand, such that the two strands hybridize and form a duplex structure when combined under suitable conditions. As described elsewhere herein and as known in the art, the complementary sequences of a dsRNA can also be contained as self-complementary regions of a single nucleic acid molecule, as opposed to being on separate oligonucleotides.

[0257] Generally, the duplex structure is 15 to 30 base pairs in length, e.g., 15-29, 15-28, 15-27, 15-26, 15-25, 15-24, 15-23, 15-22, 15-21, 15-20, 15-19, 15-18, 15-17, 18-30, 18-29, 18-28, 18-27, 18-26, 18-25, 18-24, 18-23, 18-22, 18-21, 18-20, 19-30, 19-29, 19-28, 19-27, 19-26, 19-25, 19-24, 19-23, 19-22, 19-21, 19-20, 20-30, 20-29, 20-28, 20-27, 20-26, 20-25, 20-24, 20-23, 20-22, 20-21, 21-30, 21-29, 21-28, 21-27, 21-26, 21-25, 21-24, 21-23, or 21-22 base pairs in length. In certain preferred embodiments, the duplex structure is 18 to 25 base pairs in length, e.g., 18-25, 18-24, 18-23, 18-22, 18-21, 18-20, 19-25, 19-24, 19-23, 19-22, 19-21, 19-20, 20-25, 20-24, 20-23, 20-22, 20-21, 21-25, 21-24, 21-23, 21-22, 22-25, 22-24, 22-23, 23-25, 23-24 or 24-25 base pairs in length, for example, 19-21 base pairs in length. Ranges and lengths intermediate to the above recited ranges and lengths are also contemplated to be part of the disclosure.

[0258] Similarly, the region of complementarity to the target sequence is 15 to 30 nucleotides in length, e.g., 15-29, 15-28, 15-27, 15-26, 15-25, 15-24, 15-23, 15-22, 15-21, 15-20, 15-19, 15-18, 15-17, 18-30, 18-29, 18-28, 18-27, 18-26, 18-25, 18-24, 18-23, 18-22, 18-21, 18-20, 19-30, 19-29, 19-28, 19-27, 19-26, 19-25, 19-24, 19-23, 19-22, 19-21, 19-20, 20-30, 20-29, 20-28, 20-27, 20-26, 20-25, 20-24, 20-23, 20-22, 20-21, 21-30, 21-29, 21-28, 21-27, 21-26, 21-25, 21-24, 21-23, or 21-22 nucleotides in length, for example 19-23 nucleotides in length or 21-23 nucleotides in length. Ranges and lengths intermediate to the above recited ranges and lengths are also contemplated to be part of the disclosure.

[0259] In some embodiments, the duplex structure is 19 to 30 base pairs in length. Similarly, the region of complementarity to the target sequence is 19 to 30 nucleotides in length.

[0260] In some embodiments, the dsRNA is 15 to 23 nucleotides in length, 19 to 23 nucleotides in length, or 25 to 30 nucleotides in length. In general, the dsRNA is long enough to serve as a substrate for the Dicer enzyme. For example, it is well known in the art that dsRNAs longer than about 21-23 nucleotides can serve as substrates for Dicer. As the ordinarily skilled person will also recognize, the region of an RNA targeted for cleavage will most often be part of a larger RNA molecule, often an mRNA molecule. Where relevant, a “part” of an mRNA target is a contiguous sequence of an mRNA target of sufficient length to allow it to be a substrate for RNAi-directed cleavage (i.e., cleavage through a RISC pathway).

[0261] One of skill in the art will also recognize that the duplex region is a primary functional portion of a dsRNA, e.g., a duplex region of about 15 to 36 base pairs, e.g., 15-36, 15-35, 15-34, 15-33, 15-32, 15-31, 15-30, 15-29, 15-28, 15-27, 15-26, 15-25, 15-24, 15-23, 15-22, 15-21, 15-20, 15-19, 15-18, 15-17, 18-30, 18-29, 18-28, 18-27, 18-26, 18-25, 18-24, 18-23, 18-22, 18-21, 18-20, 19-30, 19-29, 19-28, 19-27, 19-26, 19-25, 19-24, 19-23, 19-22, 19-21, 19-20, 20-30, 20-29, 20-28, 20-27, 20-26, 20-25, 20-24, 20-23, 20-22, 20-21, 21-30, 21-29, 21-28, 21-27, 21-26, 21-25, 21-24, 21-23, or 21-22 base pairs, for example, 19-21 base pairs. Thus, in one embodiment, to the extent that it becomes processed to a functional duplex, of e.g., 15-30 base pairs, that targets a desired RNA for cleavage, an RNA molecule or complex of RNA molecules having a duplex region greater than 30 base pairs is a dsRNA. Thus, an ordinarily skilled artisan will recognize that in one embodiment, a miRNA is a dsRNA. In another embodiment, a dsRNA is not a naturally occurring miRNA. In another embodiment, an RNAi agent useful to target 4R-tau expression is not generated in the target cell by cleavage of a larger dsRNA.

[0262] A dsRNA as described herein can further include one or more single-stranded nucleotide overhangs e.g., 1, 2, 3, or 4 nucleotides. A nucleotide overhang can comprise or consist of a nucleotide/nucleoside analog, including a deoxynucleotide/nucleoside. The overhang(s) can be on the sense strand, the antisense strand or any combination thereof. Furthermore, the nucleotide(s) of an overhang can be present on the 5′-end, 3′-end or both ends of either an antisense or sense strand of a dsRNA.

[0263] A dsRNA can be synthesized by standard methods known in the art. Double stranded RNAi compounds of the disclosure may be prepared using a two-step procedure. First, the individual strands of the double stranded RNA molecule are prepared separately. Then, the component strands are annealed. The individual strands of the siRNA compound can be prepared using solution-phase or solid-phase organic synthesis or both. Organic synthesis offers the advantage that the oligonucleotide strands comprising unnatural or modified nucleotides can be easily prepared. Similarly, single-stranded oligonucleotides of the disclosure can be prepared using solution-phase or solid-phase organic synthesis or both.

[0264] In one aspect, a dsRNA of the disclosure includes at least two nucleotide sequences, a sense sequence and an antisense sequence. The sense strand sequence for MAPT may be selected from the group of sequences provided in Table 7 or 8, and the corresponding nucleotide sequence of the antisense strand of the sense strand may be selected from the group of sequences of Table 7 or 8. In this aspect, one of the two sequences is complementary to the other of the two sequences, with one of the sequences being substantially complementary to a sequence of an mRNA generated in the expression of a 4R-tau isoform. As such, in this aspect, a dsRNA will include two oligonucleotides, where one oligonucleotide is described as the sense strand (passenger strand) in Table 7 or 8, and the second oligonucleotide is described as the corresponding antisense strand (guide strand) of the sense strand in Table 7 or 8.

[0265] In one embodiment, the sense strand comprises at least 15 contiguous nucleotides differing by no more than three nucleotides from any one of the nucleotide sequence of nucleotides 1009-1029, 1010-1030, 1011-1031, 1012-1032, 1013-1033, 1014-1034, 1015-1035, 1016-1036, 1017-1037, 1018-1038, 1019-1039, 1020-1040, 1021-1041, 1022-1042, 1023-1043, 1024-1044, 1025-1045, 1026-1046, 1027-1047, 1028-1048, 1029-1049, 1030-1050, 1031-1051, 1032-1052, 1033-1053, 1014-1048, and 1022-1048 of SEQ ID NO: 3, and the antisense strand comprises at least 15 contiguous nucleotides from the corresponding nucleotide sequence of SEQ ID NO: 4. In a particular embodiment, the sense strand comprises at least 15 contiguous nucleotides differing by no more than three nucleotides from any one of the nucleotide sequence of nucleotides 1009-1029, 1016-1036, 1018-1038, 1020-1040, 1021-1041, 1022-1042, 1024-1044, 1027-1047, 1028-1048, 1029-1049, 1030-1050, 1032-1052, 1033-1053, 1014-1048, and 1022-1048 of SEQ ID NO: 3, and the antisense strand comprises at least 15 contiguous nucleotides from the corresponding nucleotide sequence of SEQ ID NO: 4.

[0266] In certain embodiments, the antisense polynucleotides disclosed herein are substantially complementary to a fragment of a target MAPT sequence and comprise a contiguous nucleotide sequence which is at least 80% complementary over its entire length to a fragment of SEQ ID NO: 3, wherein the sense strand comprises at least 15 contiguous nucleotides differing by no more than three nucleotides from any one of the nucleotide sequence of nucleotides 1009-1029, 1010-1030, 1011-1031, 1012-1032, 1013-1033, 1014-1034, 1015-1035, 1016-1036, 1017-1037, 1018-1038, 1019-1039, 1020-1040, 1021-1041, 1022-1042, 1023-1043, 1024-1044, 1025-1045, 1026-1046, 1027-1047, 1028-1048, 1029-1049, 1030-1050, 1031-1051, 1032-1052, 1033-1053, 1014-1048, and 1022-1048 of SEQ ID NO: 3, and the antisense strand comprises at least 15 contiguous nucleotides from the corresponding nucleotide sequence of SEQ ID NO: 4. In some embodiments, the antisense polynucleotides disclosed herein are substantially complementary to a fragment of a target MAPT sequence and comprise a contiguous nucleotide sequence complementary over its entire length to a fragment of SEQ ID NO: 3, wherein the sense strand comprises at least 15 contiguous nucleotides differing by no more than three nucleotides from any one of the nucleotide sequence of nucleotides 1009-1029, 1016-1036, 1018-1038, 1020-1040, 1021-1041, 1022-1042, 1024-1044, 1027-1047, 1028-1048, 1029-1049, 1030-1050, 1032-1052, 1033-1053, 1014-1048, and 1022-1048 of SEQ ID NO: 3, and the antisense strand comprises at least 15 contiguous nucleotides from the corresponding nucleotide sequence of SEQ ID NO: 4.

[0267] In one embodiment, the antisense strand comprises at least 15 contiguous nucleotides differing by no more than three nucleotides from any one of the antisense strand nucleotide sequences of a duplex selected from the group consisting of AD-1423276, AD-1423277, AD-1423278, AD-1423279, AD-1423280, AD-1423281, AD-1423282, AD-1423283, AD-1423284, AD-1423285, AD-1423286, AD-1423287, AD-1423288, AD-1423289, AD-1423290, AD-1423291, AD-1423292, AD-1423293, AD-1423294, AD-1423295, AD-1423296, AD-1423297, AD-1423298, AD-1423299, and AD-1423300. In a particular embodiment, the antisense strand comprises at least 15 contiguous nucleotides differing by no more than three nucleotides from any one of the antisense strand nucleotide sequences of a duplex selected from the group consisting of AD-1423276, AD-1423283, AD-1423285, AD-1423287, AD-1423288, AD-1423289, AD-1423291, AD-1423294, AD-1423295, AD-1423296, AD-1423297, AD-1423299, and AD-1423300.

[0268] In some embodiments, the present disclosure provides a dsRNA agent for inhibiting expression of 4R-tau, wherein the dsRNA agent comprises a sense strand and an antisense strand forming a double stranded region, wherein the antisense strand comprises a region of complementarity to an mRNA encoding 4R-tau, and wherein the region of complementarity comprises at least 15 contiguous nucleotides differing by no more than 3 nucleotides from any one of the antisense nucleotide sequences in Table 7 or 8.

[0269] In one embodiment, the substantially complementary sequences of the dsRNA are contained on separate oligonucleotides. In another embodiment, the substantially complementary sequences of the dsRNA are contained on a single oligonucleotide.

[0270] It will be understood that, although the sequences in Tables 7 and 8, are described as modified or conjugated sequences, the RNA of the RNAi agent of the disclosure e.g., a dsRNA of the disclosure, may comprise any one of the sequences set forth in Tables 7 and 8, that is un-modified, un-conjugated, or modified or conjugated differently than described therein. For example, although the sense strands of the agents of the disclosure may be conjugated to a GalNAc ligand, these agents may be conjugated to a moiety that directs delivery to the CNS, e.g., a C16 ligand, as described herein. In one embodiment, the lipophilic moiety contains a saturated or unsaturated C16 hydrocarbon chain (e.g., a linear C16 alkyl or alkenyl). A lipophilic ligand can be included in any of the positions provided in the instant application. In some embodiments, the lipophilic moiety is conjugated to a nucleobase, sugar moiety, or internucleosidic linkage of the double-stranded iRNA agent. For example, a C16 ligand may be conjugated via the 2′-oxygen of a ribonucleotide as shown in the following structure:

[chemical structure]

where * denotes a bond to an adjacent nucleotide, and B is a nucleobase or a nucleobase analog, optionally where B is adenine, guanine, cytosine, thymine or uracil. Design and Synthesis of the ligands and monomers provided herein are described, for example, in PCT publication Nos. WO2019/217459, WO2020/132227, and WO2020/257194, contents of which are incorporated herein by reference in their entirety.

[0271] In some embodiments, the double-stranded iRNA agent further comprises a phosphate or phosphate mimic at the 5′-end of the antisense strand. In one embodiment, the phosphate mimic is a 5′-vinyl phosphonate (VP). In one embodiment, the phosphate mimic is a 5′-cyclopropyl phosphonate (VP).

[0272] In some embodiments, the 5′-end of the antisense strand of the double-stranded iRNA agent does not contain a 5′-vinyl phosphonate (VP).

[0273] In one embodiment, at least one of the modified nucleotides is selected from the group consisting of a deoxy-nucleotide, a 2′-O-methyl modified nucleotide, a 2′-fluoro modified nucleotide, a 2′-deoxy-modified nucleotide, a glycol modified nucleotide (GNA), e.g., Ggn, Cgn, Tgn, or Agn, a nucleotide with a 2′ phosphate, e.g., G2p, C2p, A2p or U2p, and, a vinyl-phosphonate nucleotide; and combinations thereof.

[0274] In other embodiments, each of the duplexes of Tables 7 and 8 may be particularly modified to provide another double-stranded iRNA agent of the present disclosure. In one example, the 3′-terminus of each sense duplex may be modified by removing the 3′-terminal L96 ligand and exchanging the two phosphodiester internucleotide linkages between the three 3′-terminal nucleotides with phosphorothioate internucleotide linkages. That is, the three 3′-terminal nucleotides (N) of a sense sequence of the formula:

5′-N₁—. . . —Nₙ₋₂Nₙ₋₁NₙL96 3′

may be replaced with

5′-N₁—. . . —Nₙ₋₂sNₙ₋₁sNₙ3′.

[0275] That is, for example, for AD-1423297, the sense sequence:

asasgga(Uhd)aaUfAfUfcaaacacguaL96

may be replaced with

asasgga(Uhd)aaUfAfUfcaaacacgsusa

while the antisense sequence remains unchanged to provide another double-stranded iRNA agent of the present disclosure. In other examples, the sense strand of each of the following duplexes are modified according to the preceding description to provide a duplex of the disclosure: AD-1423277, AD-1423278, AD-1423279, AD-1423280, AD-1423281, AD-1423282, AD-1423283, AD-1423284, AD-1423285, AD-1423286, AD-1423287, AD-1423288, AD-1423289, AD-1423290, AD-1423291, AD-1423292, AD-1423293, AD-1423294, AD-1423295, AD-1423296, AD-1423297, AD-1423298, AD-1423299, and AD-1423300.

[0276] The skilled person is well aware that dsRNAs having a duplex structure of about 20 to 23 base pairs, e.g., 21, base pairs have been hailed as particularly effective in inducing RNA interference (Elbashir et al., (2001) EMBO J., 20:6877-6888). However, others have found that shorter or longer RNA duplex structures can also be effective (Chu and Rana (2007) RNA 14:1714-1719; Kim et al. (2005) Nat Biotech 23:222-226). In the embodiments described above, by virtue of the nature of the oligonucleotide sequences provided herein, dsRNAs described herein can include at least one strand of a length of minimally 21 nucleotides. It can be reasonably expected that shorter duplexes minus only a few nucleotides on one or both ends can be similarly effective as compared to the dsRNAs described above. Hence, dsRNAs having a sequence of at least 15, 16, 17, 18, 19, 20, or more contiguous nucleotides derived from one of the sequences provided herein, and differing in their ability to inhibit the expression of a 4R-tau isoform by at least about 25%, at least about 30%, at least about 40%, at least about 50%, at least about 60%, at least about 70%, at least about 80%, at least about 90%, or at least about 95% inhibition relative to a control level, from a dsRNA comprising the full sequence using the in vitro assay with, e.g., A549 cells and a 10 nM concentration of the RNA agent and the PCR assay as provided in the examples herein, are contemplated to be within the scope of the present disclosure. In some embodiments, inhibition from a dsRNA comprising the full sequence was measured using the in vitro assay with primary mouse hepatocytes.

[0277] In addition, the RNAs described herein identify a site(s) in a MAPT transcript that is susceptible to RISC-mediated cleavage. As such, the present disclosure further features RNAi agents that target within this site(s). As used herein, an RNAi agent is said to target within a particular site of an RNA transcript if the RNAi agent promotes cleavage of the transcript anywhere within that particular site. Such an RNAi agent will generally include at least about 15 contiguous nucleotides, preferably at least 19 nucleotides, from one of the sequences provided herein coupled to additional nucleotide sequences taken from the region contiguous to the selected sequence in a MAPT gene.

### III. Modified RNAi Agents of the Disclosure

[0278] In one embodiment, the RNA of the RNAi agent of the disclosure e.g., a dsRNA, is un-modified, and does not comprise, e.g., chemical modifications or conjugations known in the art and described herein. In preferred embodiments, the RNA of an RNAi agent of the disclosure, e.g., a dsRNA, is chemically modified to enhance stability or other beneficial characteristics. In certain embodiments of the disclosure, substantially all of the nucleotides of an RNAi agent of the disclosure are modified. In other embodiments of the disclosure, all of the nucleotides of an RNAi agent of the disclosure are modified. RNAi agents of the disclosure in which “substantially all of the nucleotides are modified” are largely but not wholly modified and can include not more than 5, 4, 3, 2, or unmodified nucleotides. In still other embodiments of the disclosure, RNAi agents of the disclosure can include not more than 5, 4, 3, 2 or 1 modified nucleotides.

[0279] The nucleic acids featured in the disclosure can be synthesized or modified by methods well established in the art, such as those described in “Current protocols in nucleic acid chemistry,” Beaucage, S. L. et al. (Edrs.), John Wiley & Sons, Inc., New York, NY, USA, which is hereby incorporated herein by reference. Modifications include, for example, end modifications, e.g., 5′-end modifications (phosphorylation, conjugation, inverted linkages) or 3′-end modifications (conjugation, DNA nucleotides, inverted linkages, etc.); base modifications, e.g., replacement with stabilizing bases, destabilizing bases, or bases that base pair with an expanded repertoire of partners, removal of bases (abasic nucleotides), or conjugated bases; sugar modifications (e.g., at the 2′-position or 4′-position) or replacement of the sugar; or backbone modifications, including modification or replacement of the phosphodiester linkages. Specific examples of RNAi agents useful in the embodiments described herein include, but are not limited to, RNAs containing modified backbones or no natural internucleoside linkages. RNAs having modified backbones include, among others, those that do not have a phosphorus atom in the backbone. For the purposes of this specification, and as sometimes referenced in the art, modified RNAs that do not have a phosphorus atom in their internucleoside backbone can also be considered to be oligonucleosides. In some embodiments, a modified RNAi agent will have a phosphorus atom in its internucleoside backbone.

[0280] Modified RNA backbones include, for example, phosphorothioates, chiral phosphorothioates, phosphorodithioates, phosphotriesters, aminoalkylphosphotriesters, methyl and other alkyl phosphonates including 3′-alkylene phosphonates and chiral phosphonates, phosphinates, phosphoramidates including 3′-amino phosphoramidate and aminoalkylphosphoramidates, thionophosphoramidates, thionoalkylphosphonates, thionoalkylphosphotriesters, and boranophosphates having normal 3′-5′ linkages, 2′-5′-linked analogs of these, and those having inverted polarity wherein the adjacent pairs of nucleoside units are linked 3′-5′ to 5′-3′ or 2′-5′ to 5′-2′. Various salts, mixed salts and free acid forms are also included. In some embodiments of the disclosure, the dsRNA agents of the disclosure are in a free acid form. In other embodiments of the disclosure, the dsRNA agents of the disclosure are in a salt form. In one embodiment, the dsRNA agents of the disclosure are in a sodium salt form. In certain embodiments, when the dsRNA agents of the disclosure are in the sodium salt form, sodium ions are present in the agent as counterions for substantially all of the phosphodiester and/or phosphorothiotate groups present in the agent. Agents in which substantially all of the phosphodiester and/or phosphorothioate linkages have a sodium counterion include not more than 5, 4, 3, 2, or 1 phosphodiester and/or phosphorothioate linkages without a sodium counterion. In some embodiments, when the dsRNA agents of the disclosure are in the sodium salt form, sodium ions are present in the agent as counterions for all of the phosphodiester and/or phosphorothiotate groups present in the agent.

[0281] Representative U.S. patents that teach the preparation of the above phosphorus-containing linkages include, but are not limited to, U.S. Pat. Nos. 3,687,808; 4,469,863; 4,476,301; 5,023,243; 5,177,195; 5,188,897; 5,264,423; 5,276,019; 5,278,302; 5,286,717; 5,321,131; 5,399,676; 5,405,939; 5,453,496; 5,455,233; 5,466,677; 5,476,925; 5,519,126; 5,536,821; 5,541,316; 5,550,111; 5,563,253; 5,571,799; 5,587,361; 5,625,050; 6,028,188; 6,124,445; 6,160,109; 6,169,170; 6,172,209; 6,239,265; 6,277,603; 6,326,199; 6,346,614; 6,444,423; 6,531,590; 6,534,639; 6,608,035; 6,683,167; 6,858,715; 6,867,294; 6,878,805; 7,015,315; 7,041,816; 7,273,933; 7,321,029; and U.S. Pat. RE39464, the entire contents of each of which are hereby incorporated herein by reference.

[0282] Modified RNA backbones that do not include a phosphorus atom therein have backbones that are formed by short chain alkyl or cycloalkyl internucleoside linkages, mixed heteroatoms and alkyl or cycloalkyl internucleoside linkages, or one or more short chain heteroatomic or heterocyclic internucleoside linkages. These include those having morpholino linkages (formed in part from the sugar portion of a nucleoside); siloxane backbones; sulfide, sulfoxide and sulfone backbones; formacetyl and thioformacetyl backbones; methylene formacetyl and thioformacetyl backbones; alkene containing backbones; sulfamate backbones; methyleneimino and methylenehydrazino backbones; sulfonate and sulfonamide backbones; amide backbones; and others having mixed N, O, S and CH₂ component parts.

[0283] Representative U.S. patents that teach the preparation of the above oligonucleosides include, but are not limited to, U.S. Pat. Nos. 5,034,506; 5,166,315; 5,185,444; 5,214,134; 5,216,141; 5,235,033; 5,64,562; 5,264,564; 5,405,938; 5,434,257; 5,466,677; 5,470,967; 5,489,677; 5,541,307; 5,561,225; 5,596,086; 5,602,240; 5,608,046; 5,610,289; 5,618,704; 5,623,070; 5,663,312; 5,633,360; 5,677,437; and, 5,677,439, the entire contents of each of which are hereby incorporated herein by reference.

[0284] In other embodiments, suitable RNA mimetics are contemplated for use in RNAi agents, in which both the sugar and the internucleoside linkage, i.e., the backbone, of the nucleotide units are replaced with alternate groups. The base units are maintained for hybridization with an appropriate nucleic acid target compound. One such oligomeric compound, a RNA mimetic that has been shown to have excellent hybridization properties, is referred to as a peptide nucleic acid (PNA). In PNA compounds, the sugar backbone of an RNA is replaced with an amide containing backbone, in particular an aminoethylglycine backbone. The nucleobases are retained and are bound directly or indirectly to aza nitrogen atoms of the amide portion of the backbone. Representative U.S. patents that teach the preparation of PNA compounds include, but are not limited to, U.S. Pat. Nos. 5,539,082; 5,714,331; and 5,719,262, the entire contents of each of which are hereby incorporated herein by reference. Additional PNA compounds suitable for use in the RNAi agents of the disclosure are described in, for example, in Nielsen et al., Science, 1991, 254, 1497-1500.

[0285] Some embodiments featured in the disclosure include RNAs with phosphorothioate backbones and oligonucleosides with heteroatom backbones, and in particular —CH₂—NH—CH₂—, —CH₂—N(CH₃)—O——CH₂— [known as a methylene (methylimino) or MMI backbone], —CH₂—O—N(CH₃)—CH₂—, —CH₂—N(CH₃)—N(CH₃)—CH₂— and —N(CH₃)—CH₂— [wherein the native phosphodiester backbone is represented as —O—P—O—CH₂—] of the above-referenced U.S. Pat. No. 5,489,677, and the amide backbones of the above-referenced U.S. Pat. No. 5,602,240. In some embodiments, the RNAs featured herein have morpholino backbone structures of the above-referenced U.S. Pat. No. 5,034,506.

[0286] Modified RNAs can also contain one or more substituted sugar moieties. The RNAi agents, e.g., dsRNAs, featured herein can include one of the following at the 2′-position: OH; F; O—, S—, or N-alkyl; O—S—, or N-alkenyl; O—, S— or N-alkynyl; or O-alkyl-O-alkyl, wherein the alkyl, alkenyl and alkynyl can be substituted or unsubstituted C₁ to C₁₀ alkyl or C₂ to C₁₀ alkenyl and alkynyl. Exemplary suitable modifications include O[(CH₂)ₙO]ₘCH₃, O(CH₂)_{·n}OCH₃, O(CH₂)ₙNH₂, O(CH₂)ₙCH₃, O(CH₂)ₙONH₂, and O(CH₂)ₙON[(CH₂)ₙCH₃)]₂, where n and m are from 1 to about 10. In other embodiments, dsRNAs include one of the following at the 2′ position: C₁ to C₁₀ lower alkyl, substituted lower alkyl, alkaryl, aralkyl, O-alkaryl or O-aralkyl, SH, SCH₃, OCN, Cl, Br, CN, CF₃, OCF₃, SOCH₃, SO₂CH₃, ONO₂, NO₂, N₃, NH₂, heterocycloalkyl, heterocycloalkaryl, aminoalkylamino, polyalkylamino, substituted silyl, an RNA cleaving group, a reporter group, an intercalator, a group for improving the pharmacokinetic properties of an RNAi agent, or a group for improving the pharmacodynamic properties of an RNAi agent, and other substituents having similar properties. In some embodiments, the modification includes a 2′-methoxyethoxy (2′-O—CH₂CH₂OCH₃, also known as 2′-O-(2-methoxyethyl) or 2′-MOE) (Martin et al., Helv. Chim. Acta, 1995, 78:486-504) i.e., an alkoxy-alkoxy group. Another exemplary modification is 2′-dimethylaminooxyethoxy, i.e., a O(CH₂)₂ON(CH₃)₂ group, also known as 2′-DMAOE, as described in examples herein below, and 2′-dimethylaminoethoxyethoxy (also known in the art as 2′-O-dimethylaminoethoxyethyl or 2′-DMAEOE), i.e., 2′-O—CH₂—O—CH₂—N(CH₂)₂. Further exemplary modifications include: 5′-Me-2′-F nucleotides, 5′-Me-2′-OMe nucleotides, 5′-Me-2′-deoxynucleotides, (both R and S isomers in these three families); 2′-alkoxyalkyl; and 2′-NMA (N-methylacetamide).

[0287] Other modifications include 2′-methoxy (2′-OCH₃), 2′-aminopropoxy (2′-OCH₂CH₂CH₂NH₂), 2′-O-hexadecyl, and 2′-fluoro (2′-F). Similar modifications can also be made at other positions on the RNA of an RNAi agent, particularly the 3′ position of the sugar on the 3′ terminal nucleotide or in 2′-5′ linked dsRNAs and the 5′ position of 5′ terminal nucleotide. RNAi agents can also have sugar mimetics such as cyclobutyl moieties in place of the pentofuranosyl sugar. Representative U.S. patents that teach the preparation of such modified sugar structures include, but are not limited to, U.S. Pat. Nos. 4,981,957; 5,118,800; 5,319,080; 5,359,044; 5,393,878; 5,446,137; 5,466,786; 5,514,785; 5,519,134; 5,567,811; 5,576,427; 5,591,722; 5,597,909; 5,610,300; 5,627,053; 5,639,873; 5,646,265; 5,658,873; 5,670,633; and 5,700,920, certain of which are commonly owned with the instant application. The entire contents of each of the foregoing are hereby incorporated herein by reference.

[0288] An RNAi agent of the disclosure can also include nucleobase (often referred to in the art simply as “base”) modifications or substitutions. As used herein, “unmodified” or “natural” nucleobases include the purine bases adenine (A) and guanine (G), and the pyrimidine bases thymine (T), cytosine (C) and uracil (U). Modified nucleobases include other synthetic and natural nucleobases such as 5-methylcytosine (5-me-C), 5-hydroxymethyl cytosine, xanthine, hypoxanthine, 2-aminoadenine, 6-methyl and other alkyl derivatives of adenine and guanine, 2-propyl and other alkyl derivatives of adenine and guanine, 2-thiouracil, 2-thiothymine and 2-thiocytosine, 5-halouracil and cytosine, 5-propynyl uracil and cytosine, 6-azo uracil, cytosine and thymine, 5-uracil (pseudouracil), 4-thiouracil, 8-halo, 8-amino, 8-thiol, 8-thioalkyl, 8-hydroxyl anal other 8-substituted adenines and guanines, 5-halo, particularly 5-bromo, 5-trifluoromethyl and other 5-substituted uracils and cytosines, 7-methylguanine and 7-methyladenine, 8-azaguanine and 8-azaadenine, 7-deazaguanine and 7-daazaadenine and 3-deazaguanine and 3-deazaadenine. Further nucleobases include those disclosed in U.S. Pat. No. 3,687,808, those disclosed in Modified Nucleosides in Biochemistry, Biotechnology and Medicine, Herdewijn, P. ed. Wiley-VCH, 2008; those disclosed in The Concise Encyclopedia Of Polymer Science And Engineering, pages 858-859, Kroschwitz, J. L, ed. John Wiley & Sons, 1990, these disclosed by Englisch et al., (1991) Angewandte Chemie, International Edition, 30:613, and those disclosed by Sanghvi, Y S., Chapter 15, dsRNA Research and Applications, pages 289-302, Crooke, S. T. and Lebleu, B., Ed., CRC Press, 1993. Certain of these nucleobases are particularly useful for increasing the binding affinity of the oligomeric compounds featured in the disclosure. These include 5-substituted pyrimidines, 6-azapyrimidines and N-2, N-6 and 0-6 substituted purines, including 2-aminopropyladenine, 5-propynyluracil and 5-propynylcytosine. 5-methylcytosine substitutions have been shown to increase nucleic acid duplex stability by 0.6-1.2° C. (Sanghvi, Y. S., Crooke, S. T. and Lebleu, B., Eds., dsRNA Research and Applications, CRC Press, Boca Raton, 1993, pp. 276-278) and are exemplary base substitutions, even more particularly when combined with 2′-O-methoxyethyl sugar modifications.

[0289] Representative U.S. patents that teach the preparation of certain of the above noted modified nucleobases as well as other modified nucleobases include, but are not limited to, the above noted U.S. Pat. Nos. 3,687,808, 4,845,205; 5,130,30; 5,134,066; 5,175,273; 5,367,066; 5,432,272; 5,457,187; 5,459,255; 5,484,908; 5,502,177; 5,525,711; 5,552,540; 5,587,469; 5,594,121, 5,596,091; 5,614,617; 5,681,941; 5,750,692; 6,015,886; 6,147,200; 6,166,197; 6,222,025; 6,235,887; 6,380,368; 6,528,640; 6,639,062; 6,617,438; 7,045,610; 7,427,672; and 7,495,088, the entire contents of each of which are hereby incorporated herein by reference.

[0290] An RNAi agent of the disclosure can also be modified to include one or more locked nucleic acids (LNA). A locked nucleic acid is a nucleotide having a modified ribose moiety in which the ribose moiety comprises an extra bridge connecting the 2′ and 4′ carbons. This structure effectively “locks” the ribose in the 3′-endo structural conformation. The addition of locked nucleic acids to siRNAs has been shown to increase siRNA stability in serum, and to reduce off-target effects (Elmen, J. et al., (2005) Nucleic Acids Research 33(1):439-447; Mook, OR. et al., (2007) Mol Canc Ther 6(3):833-843; Grunweller, A. et al., (2003) Nucleic Acids Research 31(12):3185-3193).

[0291] An RNAi agent of the disclosure can also be modified to include one or more bicyclic sugar moieties. A “bicyclic sugar” is a furanosyl ring modified by the bridging of two atoms. A “bicyclic nucleoside” (“BNA”) is a nucleoside having a sugar moiety comprising a bridge connecting two carbon atoms of the sugar ring, thereby forming a bicyclic ring system. In certain embodiments, the bridge connects the 4′-carbon and the 2′-carbon of the sugar ring. Thus, in some embodiments an agent of the disclosure may include one or more locked nucleic acids (LNA). A locked nucleic acid is a nucleotide having a modified ribose moiety in which the ribose moiety comprises an extra bridge connecting the 2′ and 4′ carbons. In other words, an LNA is a nucleotide comprising a bicyclic sugar moiety comprising a 4′-CH2-O-2′ bridge. This structure effectively “locks” the ribose in the 3′-endo structural conformation. The addition of locked nucleic acids to siRNAs has been shown to increase siRNA stability in serum, and to reduce off-target effects (Elmen, J. et al., (2005) Nucleic Acids Research 33(1):439-447; Mook, OR. et al., (2007) Mol Canc Ther 6(3):833-843; Grunweller, A. et al., (2003) Nucleic Acids Research 31(12):3185-3193). Examples of bicyclic nucleosides for use in the polynucleotides of the disclosure include without limitation nucleosides comprising a bridge between the 4′ and the 2′ ribosyl ring atoms. In certain embodiments, the antisense polynucleotide agents of the disclosure include one or more bicyclic nucleosides comprising a 4′ to 2′ bridge. Examples of such 4′ to 2′ bridged bicyclic nucleosides, include but are not limited to 4′-(CH2)-O-2′ (LNA); 4′-(CH2)-S-2′; 4′-(CH2)2-O-2′ (ENA); 4′-CH(CH3)-O-2′ (also referred to as “constrained ethyl” or “cEt”) and 4′-CH(CH20CH3)-O-2′ (and analogs thereof, see, e.g., U.S. Pat. No. 7,399,845); 4′-C(CH3)(CH3)-O-2′ (and analogs thereof; see e.g., U.S. Pat. No. 8,278,283); 4′-CH2-N(OCH3)-2′ (and analogs thereof, see e.g., U.S. Pat. No. 8,278,425); 4′-CH2-O—N(CH3)-2′ (see, e.g., U.S. Patent Publication No. 2004/0171570); 4′-CH2—N(R)—O-2′, wherein R is H, C1-C12 alkyl, or a protecting group (see, e.g., U.S. Pat. No. 7,427,672); 4′-CH2-C(H)(CH3)-2′ (see, e.g., Chattopadhyaya et al., J. Org. Chem., 2009, 74, 118-134); and 4′-CH2-C(═CH2)-2′ (and analogs thereof, see, e.g., U.S. Pat. No. 8,278,426). The entire contents of each of the foregoing are hereby incorporated herein by reference.

[0292] Additional representative US Patents and US Patent Publications that teach the preparation of locked nucleic acid nucleotides include, but are not limited to, the following: U.S. Pat. Nos. 6,268,490; 6,525,191; 6,670,461; 6,770,748; 6,794,499; 6,998,484; 7,053,207; 7,034,133;7,084,125; 7,399,845; 7,427,672; 7,569,686; 7,741,457; 8,022,193; 8,030,467; 8,278,425; 8,278,426; 8,278,283; US 2008/0039618; and US 2009/0012281, the entire contents of each of which are hereby incorporated herein by reference.

[0293] Any of the foregoing bicyclic nucleosides can be prepared having one or more stereochemical sugar configurations including for example α-L-ribofuranose and β-D-ribofuranose (see WO 99/14226).

[0294] An RNAi agent of the disclosure can also be modified to include one or more constrained ethyl nucleotides. As used herein, a “constrained ethyl nucleotide” or “cEt” is a locked nucleic acid comprising a bicyclic sugar moiety comprising a 4′-CH(CH3)-0-2′ bridge. In one embodiment, a constrained ethyl nucleotide is in the S conformation referred to herein as “S-cEt.”

[0295] An RNAi agent of the disclosure may also include one or more “conformationally restricted nucleotides” (“CRN”). CRN are nucleotide analogs with a linker connecting the C2′ and C4′ carbons of ribose or the C3 and —C5′ carbons of ribose. CRN lock the ribose ring into a stable conformation and increase the hybridization affinity to mRNA. The linker is of sufficient length to place the oxygen in an optimal position for stability and affinity resulting in less ribose ring puckering.

[0296] Representative publications that teach the preparation of certain of the above noted CRN include, but are not limited to, US 2013/0190383; and WO 2013/036868, the entire contents of each of which are hereby incorporated herein by reference.

[0297] In some embodiments, an RNAi agent of the disclosure comprises one or more monomers that are UNA (unlocked nucleic acid) nucleotides. UNA is unlocked acyclic nucleic acid, wherein any of the bonds of the sugar has been removed, forming an unlocked “sugar” residue. In one example, UNA also encompasses monomer with bonds between C1′-C4′ have been removed (i.e. the covalent carbon-oxygen-carbon bond between the C1′ and C4′ carbons). In another example, the C2′-C3′ bond (i.e. the covalent carbon-carbon bond between the C2′ and C3′ carbons) of the sugar has been removed (see Nuc. Acids Symp. Series, 52, 133-134 (2008) and Fluiter et al., Mol. Biosyst., 2009, 10, 1039 hereby incorporated by reference).

[0298] Representative U.S. publications that teach the preparation of UNA include, but are not limited to, U.S. Pat. No. 8,314,227; and US Patent Publication Nos. 2013/0096289; 2013/0011922; and 2011/0313020, the entire contents of each of which are hereby incorporated herein by reference.

[0299] An RNAi agent of the disclosure may also include one or more “cyclohexene nucleic acids” or (“CeNA”). CeNA are nucleotide analogs with a replacement of the furanose moiety of DNA by a cyclohexene ring. Incorporation of cylcohexenyl nucleosides in a DNA chain increases the stability of a DNA/RNA hybrid. CeNA is stable against degradation in serum and a CeNA/RNA hybrid is able to activate E. Coli RNase H, resulting in cleavage of the RNA strand. (see Wang et al., Am. Chem. Soc. 2000, 122, 36, 8595-8602, hereby incorporated by reference).

[0300] Potentially stabilizing modifications to the ends of RNA molecules can include N-(acetylaminocaproyl)-4-hydroxyprolinol (Hyp-C6-NHAc), N-(caproyl-4-hydroxyprolinol (Hyp-C6), N-(acetyl-4-hydroxyprolinol (Hyp-NHAc), thymidine-2′-O-deoxythymidine (ether), N-(aminocaproyl)-4-hydroxyprolinol (Hyp-C6-amino), 2-docosanoyl-uridine-3″-phosphate, inverted base dT(idT) and others. Disclosure of this modification can be found in WO 2011/005861.

[0301] Other modifications of an RNAi agent of the disclosure include a 5′ phosphate or 5′ phosphate mimic, e.g., a 5′-terminal phosphate or phosphate mimic on the antisense strand of an RNAi agent. Suitable phosphate mimics are disclosed in, for example US 2012/0157511, the entire contents of which are incorporated herein by reference.

### A. Modified RNAi Agents Comprising Motifs of the Disclosure

[0302] In certain aspects of the disclosure, the double-stranded RNAi agents of the disclosure include agents with chemical modifications as disclosed, for example, in WO 2013/075035, the entire contents of which are incorporated herein by reference. As shown herein and in WO 2013/075035, a superior result may be obtained by introducing one or more motifs of three identical modifications on three consecutive nucleotides into a sense strand or antisense strand of an RNAi agent, particularly at or near the cleavage site. In some embodiments, the sense strand and antisense strand of the RNAi agent may otherwise be completely modified. The introduction of these motifs interrupts the modification pattern, if present, of the sense or antisense strand. The RNAi agent may be optionally conjugated with a lipophilic ligand, e.g., a C16 ligand, for instance on the sense strand. The RNAi agent may be optionally modified with a (S)-glycol nucleic acid (GNA) modification, for instance on one or more residues of the antisense strand. The resulting RNAi agents present superior gene silencing activity.

[0303] Accordingly, the disclosure provides double stranded RNAi agents capable of inhibiting the expression of a target gene (i.e., a MAPT gene) in vivo. The RNAi agent comprises a sense strand and an antisense strand. Each strand of the RNAi agent may be 15-30 nucleotides in length. For example, each strand may be 16-30 nucleotides in length, 17-30 nucleotides in length, 25-30 nucleotides in length, 27-30 nucleotides in length, 17-23 nucleotides in length, 17-21 nucleotides in length, 17-19 nucleotides in length, 19-25 nucleotides in length, 19-23 nucleotides in length, 19-21 nucleotides in length, 21-25 nucleotides in length, or 21-23 nucleotides in length. In certain embodiments, each strand is 19-23 nucleotides in length.

[0304] The sense strand and antisense strand typically form a duplex double stranded RNA (“dsRNA”), also referred to herein as an “RNAi agent.” The duplex region of an RNAi agent may be 15-30 nucleotide pairs in length. For example, the duplex region can be 16-30 nucleotide pairs in length, 17-30 nucleotide pairs in length, 27-30 nucleotide pairs in length, 17-23 nucleotide pairs in length, 17-21 nucleotide pairs in length, 17-19 nucleotide pairs in length, 19-25 nucleotide pairs in length, 19-23 nucleotide pairs in length, 19-21 nucleotide pairs in length, 21-25 nucleotide pairs in length, or 21-23 nucleotide pairs in length. In another example, the duplex region is selected from 15, 16, 17, 18, 19, 20, 21, 22, 23, 24, 25, 26, and 27 nucleotides in length. In preferred embodiments, the duplex region is 19-21 nucleotide pairs in length.

[0305] In one embodiment, the RNAi agent may contain one or more overhang regions or capping groups at the 3′-end, 5′-end, or both ends of one or both strands. The overhang can be 1-6 nucleotides in length, for instance 2-6 nucleotides in length, 1-5 nucleotides in length, 2-5 nucleotides in length, 1-4 nucleotides in length, 2-4 nucleotides in length, 1-3 nucleotides in length, 2-3 nucleotides in length, or 1-2 nucleotides in length. In preferred embodiments, the nucleotide overhang region is 2 nucleotides in length. The overhangs can be the result of one strand being longer than the other, or the result of two strands of the same length being staggered. The overhang can form a mismatch with the target mRNA or it can be complementary to the gene sequences being targeted or can be another sequence. The first and second strands can also be joined, e.g., by additional bases to form a hairpin, or by other non-base linkers.

[0306] In one embodiment, the nucleotides in the overhang region of the RNAi agent can each independently be a modified or unmodified nucleotide including, but no limited to 2′-sugar modified, such as, 2-F, 2′-O-methyl, thymidine (T), and any combinations thereof.

[0307] For example, TT can be an overhang sequence for either end on either strand. The overhang can form a mismatch with the target mRNA or it can be complementary to the gene sequences being targeted or can be another sequence.

[0308] The 5′- or 3′-overhangs at the sense strand, antisense strand or both strands of the RNAi agent may be phosphorylated. In some embodiments, the overhang region(s) contains two nucleotides having a phosphorothioate between the two nucleotides, where the two nucleotides can be the same or different. In one embodiment, the overhang is present at the 3′-end of the sense strand, antisense strand, or both strands. In one embodiment, this 3′-overhang is present in the antisense strand. In one embodiment, this 3′-overhang is present in the sense strand.

[0309] The RNAi agent may contain only a single overhang, which can strengthen the interference activity of the RNAi, without affecting its overall stability. For example, the single-stranded overhang may be located at the 3-terminal end of the sense strand or, alternatively, at the 3-terminal end of the antisense strand. The RNAi may also have a blunt end, located at the 5′-end of the antisense strand (or the 3′-end of the sense strand) or vice versa. Generally, the antisense strand of the RNAi has a nucleotide overhang at the 3′-end, and the 5′-end is blunt. While not wishing to be bound by theory, the asymmetric blunt end at the 5′-end of the antisense strand and 3′-end overhang of the antisense strand favor the guide strand loading into RISC process.

[0310] In one embodiment, the RNAi agent is double blunt-ended and 19 nucleotides in length, wherein the sense strand contains at least one motif of three 2′-F modifications on three consecutive nucleotides at positions 7, 8, 9 from the 5′end. The antisense strand contains at least one motif of three 2′-O-methyl modifications on three consecutive nucleotides at positions 11, 12, 13 from the 5′end.

[0311] In another embodiment, the RNAi agent is double blunt-ended and 20 nucleotides in length, wherein the sense strand contains at least one motif of three 2′-F modifications on three consecutive nucleotides at positions 8, 9, 10 from the 5′end. The antisense strand contains at least one motif of three 2′-O-methyl modifications on three consecutive nucleotides at positions 11, 12, 13 from the 5′end.

[0312] In yet another embodiment, the RNAi agent is a double blunt-ended and 21 nucleotides in length, wherein the sense strand contains at least one motif of three 2′-F modifications on three consecutive nucleotides at positions 9, 10, 11 from the 5′end. The antisense strand contains at least one motif of three 2′-O-methyl modifications on three consecutive nucleotides at positions 11, 12, 13 from the 5′end.

[0313] In one embodiment, the RNAi agent comprises a 21 nucleotide sense strand and a 23 nucleotide antisense strand, wherein the sense strand contains at least one motif of three 2′-F modifications on three consecutive nucleotides at positions 9, 10, 11 from the 5′end; the antisense strand contains at least one motif of three 2′-O-methyl modifications on three consecutive nucleotides at positions 11, 12, 13 from the 5′end, wherein one end of the RNAi agent is blunt, while the other end comprises a 2 nucleotide overhang. Preferably, the 2 nucleotide overhang is at the 3′-end of the antisense strand. When the 2 nucleotide overhang is at the 3′-end of the antisense strand, there may be two phosphorothioate internucleotide linkages between the terminal three nucleotides, wherein two of the three nucleotides are the overhang nucleotides, and the third nucleotide is a paired nucleotide next to the overhang nucleotide. In one embodiment, the RNAi agent additionally has two phosphorothioate internucleotide linkages between the terminal three nucleotides at both the 5′-end of the sense strand and at the 5′-end of the antisense strand. In one embodiment, every nucleotide in the sense strand and the antisense strand of the RNAi agent, including the nucleotides that are part of the motifs are modified nucleotides. In one embodiment each residue is independently modified with a 2′-O-methyl or 3′-fluoro, e.g., in an alternating motif Optionally, the RNAi agent further comprises a ligand (e.g., a lipophilic ligand, optionally a C16 ligand).

[0314] In one embodiment, the RNAi agent comprises a sense and an antisense strand, wherein the sense strand is 25-30 nucleotide residues in length, wherein starting from the 5′ terminal nucleotide (position 1) positions 1 to 23 of the first strand comprise at least 8 ribonucleotides; the antisense strand is 36-66 nucleotide residues in length and, starting from the 3′ terminal nucleotide, comprises at least 8 ribonucleotides in the positions paired with positions 1-23 of sense strand to form a duplex; wherein at least the 3′ terminal nucleotide of antisense strand is unpaired with sense strand, and up to 6 consecutive 3′ terminal nucleotides are unpaired with sense strand, thereby forming a 3′ single stranded overhang of 1-6 nucleotides; wherein the 5′ terminus of antisense strand comprises from 10-30 consecutive nucleotides which are unpaired with sense strand, thereby forming a 10-30 nucleotide single stranded 5′ overhang; wherein at least the sense strand 5′ terminal and 3′ terminal nucleotides are base paired with nucleotides of antisense strand when sense and antisense strands are aligned for maximum complementarity, thereby forming a substantially duplexed region between sense and antisense strands; and antisense strand is sufficiently complementary to a target RNA along at least 19 ribonucleotides of antisense strand length to reduce target gene expression when the double stranded nucleic acid is introduced into a mammalian cell; and wherein the sense strand contains at least one motif of three 2′-F modifications on three consecutive nucleotides, where at least one of the motifs occurs at or near the cleavage site. The antisense strand contains at least one motif of three 2′-O-methyl modifications on three consecutive nucleotides at or near the cleavage site.

[0315] In one embodiment, the RNAi agent comprises sense and antisense strands, wherein the RNAi agent comprises a first strand having a length which is at least 25 and at most 29 nucleotides and a second strand having a length which is at most 30 nucleotides with at least one motif of three 2′-O-methyl modifications on three consecutive nucleotides at position 11, 12, 13 from the 5′ end; wherein the 3′ end of the first strand and the 5′ end of the second strand form a blunt end and the second strand is 1-4 nucleotides longer at its 3′ end than the first strand, wherein the duplex region which is at least 25 nucleotides in length, and the second strand is sufficiently complementary to a target mRNA along at least 19 nucleotide of the second strand length to reduce target gene expression when the RNAi agent is introduced into a mammalian cell, and wherein dicer cleavage of the RNAi agent preferentially results in an siRNA comprising the 3′ end of the second strand, thereby reducing expression of the target gene in the mammal. Optionally, the RNAi agent further comprises a ligand.

[0316] In one embodiment, the sense strand of the RNAi agent contains at least one motif of three identical modifications on three consecutive nucleotides, where one of the motifs occurs at the cleavage site in the sense strand.

[0317] In one embodiment, the antisense strand of the RNAi agent can also contain at least one motif of three identical modifications on three consecutive nucleotides, where one of the motifs occurs at or near the cleavage site in the antisense strand.

[0318] For an RNAi agent having a duplex region of 17-23 nucleotide in length, the cleavage site of the antisense strand is typically around the 10, 11 and 12 positions from the 5′-end. Thus the motifs of three identical modifications may occur at the 9, 10, 11 positions; 10, 11, 12 positions; 11, 12, 13 positions; 12, 13, 14 positions; or 13, 14, 15 positions of the antisense strand, the count starting from the 1′ nucleotide from the 5′-end of the antisense strand, or, the count starting from the 1′ paired nucleotide within the duplex region from the 5′-end of the antisense strand. The cleavage site in the antisense strand may also change according to the length of the duplex region of the RNAi from the 5′-end.

[0319] The sense strand of the RNAi agent may contain at least one motif of three identical modifications on three consecutive nucleotides at the cleavage site of the strand; and the antisense strand may have at least one motif of three identical modifications on three consecutive nucleotides at or near the cleavage site of the strand. When the sense strand and the antisense strand form a dsRNA duplex, the sense strand and the antisense strand can be so aligned that one motif of the three nucleotides on the sense strand and one motif of the three nucleotides on the antisense strand have at least one nucleotide overlap, i.e., at least one of the three nucleotides of the motif in the sense strand forms a base pair with at least one of the three nucleotides of the motif in the antisense strand. Alternatively, at least two nucleotides may overlap, or all three nucleotides may overlap.

[0320] In one embodiment, the sense strand of the RNAi agent may contain more than one motif of three identical modifications on three consecutive nucleotides. The first motif may occur at or near the cleavage site of the strand and the other motifs may be a wing modification. The term “wing modification” herein refers to a motif occurring at another portion of the strand that is separated from the motif at or near the cleavage site of the same strand. The wing modification is either adjacent to the first motif or is separated by at least one or more nucleotides. When the motifs are immediately adjacent to each other, then the chemistry of the motifs are distinct from each other and when the motifs are separated by one or more nucleotide than the chemistries can be the same or different. Two or more wing modifications may be present. For instance, when two wing modifications are present, each wing modification may occur at one end relative to the first motif which is at or near cleavage site or on either side of the lead motif.

[0321] Like the sense strand, the antisense strand of the RNAi agent may contain more than one motif of three identical modifications on three consecutive nucleotides, with at least one of the motifs occurring at or near the cleavage site of the strand. This antisense strand may also contain one or more wing modifications in an alignment similar to the wing modifications that may be present on the sense strand.

[0322] In one embodiment, the wing modification on the sense strand or antisense strand of the RNAi agent typically does not include the first one or two terminal nucleotides at the 3′-end, 5′-end or both ends of the strand.

[0323] In another embodiment, the wing modification on the sense strand or antisense strand of the RNAi agent typically does not include the first one or two paired nucleotides within the duplex region at the 3′-end, 5′-end or both ends of the strand.

[0324] When the sense strand and the antisense strand of the RNAi agent each contain at least one wing modification, the wing modifications may fall on the same end of the duplex region, and have an overlap of one, two or three nucleotides.

[0325] When the sense strand and the antisense strand of the RNAi agent each contain at least two wing modifications, the sense strand and the antisense strand can be so aligned that two modifications each from one strand fall on one end of the duplex region, having an overlap of one, two or three nucleotides; two modifications each from one strand fall on the other end of the duplex region, having an overlap of one, two or three nucleotides; two modifications one strand fall on each side of the lead motif, having an overlap of one, two, or three nucleotides in the duplex region.

[0326] In one embodiment, the RNAi agent comprises mismatch(es) with the target, within the duplex, or combinations thereof. The mismatch may occur in the overhang region or the duplex region. The base pair may be ranked on the basis of their propensity to promote dissociation or melting (e.g., on the free energy of association or dissociation of a particular pairing, the simplest approach is to examine the pairs on an individual pair basis, though next neighbor or similar analysis can also be used). In terms of promoting dissociation: A:U is preferred over G:C; G:U is preferred over G:C; and I:C is preferred over G:C (I=inosine). Mismatches, e.g., non-canonical or other than canonical pairings (as described elsewhere herein) are preferred over canonical (A:T, A:U, G:C) pairings; and pairings which include a universal base are preferred over canonical pairings.

[0327] In one embodiment, the RNAi agent comprises at least one of the first 1, 2, 3, 4, or 5 base pairs within the duplex regions from the 5′-end of the antisense strand independently selected from the group of: A:U, G:U, I:C, and mismatched pairs, e.g., non-canonical or other than canonical pairings or pairings which include a universal base, to promote the dissociation of the antisense strand at the 5′-end of the duplex.

[0328] In one embodiment, the nucleotide at the 1 position within the duplex region from the 5′-end in the antisense strand is selected from the group consisting of A, dA, dU, U, and dT. Alternatively, at least one of the first 1, 2 or 3 base pair within the duplex region from the 5′-end of the antisense strand is an AU base pair. For example, the first base pair within the duplex region from the 5′-end of the antisense strand is an AU base pair.

[0329] In another embodiment, the nucleotide at the 3′-end of the sense strand is deoxy-thymine (dT). In another embodiment, the nucleotide at the 3′-end of the antisense strand is deoxy-thymine (dT). In one embodiment, there is a short sequence of deoxy-thymine nucleotides, for example, two dT nucleotides on the 3′-end of the sense or antisense strand.

[0330] In one embodiment, the sense strand sequence may be represented by formula (I):

5′nₚ-Nₐ—(X X)ᵢ-N_{b}-Y Y-N_{b}—(Z)ⱼ-Nₐ-n_{q}3′ (I)
[0331] wherein:
[0332] i and j are each independently 0 or 1;
[0333] p and q are each independently 0-6;
[0334] each Nₐ independently represents an oligonucleotide sequence comprising 0-25 modified nucleotides, each sequence comprising at least two differently modified nucleotides;
[0335] each N_{b} independently represents an oligonucleotide sequence comprising 0-10 modified nucleotides;
[0336] each nₚ and n_{q} independently represent an overhang nucleotide;
[0337] wherein N_{b} and Y do not have the same modification; and
[0338] XXX, YYY and ZZZ each independently represent one motif of three identical modifications on three consecutive nucleotides. Preferably YYY is all 2′-F modified nucleotides.

[0339] In one embodiment, the Nₐ or N_{b} comprise modifications of alternating pattern.

[0340] In one embodiment, the YYY motif occurs at or near the cleavage site of the sense strand. For example, when the RNAi agent has a duplex region of 17-23 nucleotides in length, the YYY motif can occur at or the vicinity of the cleavage site (e.g.: can occur at positions 6, 7, 8, 7, 8, 9, 8, 9, 10, 9, 10, 11, 10, 11, 12 or 11, 12, 13) of the sense strand, the count starting from the 1′ nucleotide, from the 5′-end; or optionally, the count starting at the 1′ paired nucleotide within the duplex region, from the 5′-end.

[0341] In one embodiment, i is 1 and j is 0, or i is 0 and j is 1, or both i and j are 1. The sense strand can therefore be represented by the following formulas:

5′nₚ-Nₐ—YYY—N_{b}-ZZZ-Nₐ-n_{q}3′ (Ib);

5′nₚ-Nₐ—XXX—N_{b}-YYY-Nₐ-n_{q}3′ (Ic); or

5′nₚ-Nₐ—XXX—N_{b}-YYY—N_{b}-ZZZ-Nₐ-n_{q}3′ (Id).

[0342] When the sense strand is represented by formula (Ib), N_{b} represents an oligonucleotide sequence comprising 0-10, 0-7, 0-5, 0-4, 0-2 or 0 modified nucleotides.

[0343] Each Nₐ independently can represent an oligonucleotide sequence comprising 2-20, 2-15, or 2-10 modified nucleotides.

[0344] When the sense strand is represented as formula (Ic), N_{b} represents an oligonucleotide sequence comprising 0-10, 0-7, 0-10, 0-7, 0-5, 0-4, 0-2 or 0 modified nucleotides. Each Nₐ can independently represent an oligonucleotide sequence comprising 2-20, 2-15, or 2-10 modified nucleotides.

[0345] When the sense strand is represented as formula (Id), each N_{b} independently represents an oligonucleotide sequence comprising 0-10, 0-7, 0-5, 0-4, 0-2 or 0 modified nucleotides. Preferably, N_{b} is 0, 1, 2, 3, 4, 5 or 6. Each Nₐ can independently represent an oligonucleotide sequence comprising 2-20, 2-15, or 2-10 modified nucleotides.

[0346] Each of X, Y and Z may be the same or different from each other.

[0347] In other embodiments, i is 0 and j is 0, and the sense strand may be represented by the formula:

5′nₚ-Nₐ-YYY-Nₐn_{g}3′ (Ia).

[0348] When the sense strand is represented by formula (Ia), each Nₐ independently can represent an oligonucleotide sequence comprising 2-20, 2-15, or 2-10 modified nucleotides.

[0349] In one embodiment, the antisense strand sequence of the RNAi may be represented by formula (Ie):

5‘n_{q}’-Nₐ′—(Z′Z′Z′)ₖ-N_{b}′-Y′Y′Y′-N_{b}′—(X′X′X′)—N′ₐ-nₚ′3′ (Ie)
[0350] wherein:
[0351] k and 1 are each independently 0 or 1;
[0352] p′ and q′ are each independently 0-6;
[0353] each Nₐ′ independently represents an oligonucleotide sequence comprising 0-25 modified nucleotides, each sequence comprising at least two differently modified nucleotides;
[0354] each N_{b}′ independently represents an oligonucleotide sequence comprising 0-10 modified nucleotides;
[0355] each nₚ′ and n_{q}′ independently represent an overhang nucleotide;
[0356] wherein N_{b}′ and Y′ do not have the same modification;
[0357] and X′X′X′, Y′Y′Y′ and Z′Z′Z′ each independently represent one motif of three identical modifications on three consecutive nucleotides.

[0358] In one embodiment, the Nₐ′ or N_{b}′ comprise modifications of alternating pattern.

[0359] The Y′Y′Y′ motif occurs at or near the cleavage site of the antisense strand. For example, when the RNAi agent has a duplex region of 17-23nucleotidein length, the Y′Y′Y′ motif can occur at positions 9, 10, 11;10, 11, 12; 11, 12, 13; 12, 13, 14; or 13, 14, 15 of the antisense strand, with the count starting from the 1^{st} nucleotide, from the 5′-end; or optionally, the count starting at the 1^{st} paired nucleotide within the duplex region, from the 5′-end. Preferably, the Y′Y′Y′ motif occurs at positions 11, 12, 13.

[0360] In one embodiment, Y′Y′Y′ motif is all 2′-OMe modified nucleotides.

[0361] In one embodiment, k is 1 and 1 is 0, or k is 0 and 1 is 1, or both k and 1 are 1.

[0362] The antisense strand can therefore be represented by the following formulas:

5′n_{q}′-Nₐ′—Z′Z′Z′—N_{b}′-Y′Y′Y′-Nₐ′-n_{p′}3′ (If);

5′n_{q′}-Nₐ′-Y′Y′Y′-N_{b}′-X′X′X′-n_{p′}3′ (Ig); or

5′n_{q′}-Nₐ′—Z′Z′Z′-N_{b}′-Y′Y′Y′-N_{b}′-X′X′X′-Nₐ′-n_{p′}3′(Ih).

[0363] When the antisense strand is represented by formula (If), N_{b}′ represents an oligonucleotide sequence comprising 0-10, 0-7, 0-10, 0-7, 0-5, 0-4, 0-2 or 0 modified nucleotides. Each Nₐ′ independently represents an oligonucleotide sequence comprising 2-20, 2-15, or 2-10 modified nucleotides.

[0364] When the antisense strand is represented as formula (Ig), N_{b}′ represents an oligonucleotide sequence comprising 0-10, 0-7, 0-10, 0-7, 0-5, 0-4, 0-2 or 0 modified nucleotides. Each Nₐ′ independently represents an oligonucleotide sequence comprising 2-20, 2-15, or 2-10 modified nucleotides.

[0365] When the antisense strand is represented as formula (Ih), each N_{b}′ independently represents an oligonucleotide sequence comprising 0-10, 0-7, 0-10, 0-7, 0-5, 0-4, 0-2 or 0 modified nucleotides. Each Nₐ′ independently represents an oligonucleotide sequence comprising 2-20, 2-15, or 2-10 modified nucleotides. Preferably, N_{b} is 0, 1, 2, 3, 4, 5 or 6.

[0366] In other embodiments, k is 0 and 1 is 0 and the antisense strand may be represented by the formula:

5′n_{p′}-Nₐ-Y′Y′Y′-Nₐ′-n_{g}3′ (Ia).

[0367] When the antisense strand is represented as formula (Ie), each Nₐ′ independently represents an oligonucleotide sequence comprising 2-20, 2-15, or 2-10 modified nucleotides.

[0368] Each of X′, Y′ and Z′ may be the same or different from each other.

[0369] Each nucleotide of the sense strand and antisense strand may be independently modified with LNA, HNA, CeNA, 2′-methoxyethyl, 2′-O-methyl, 2′-O-allyl, 2′-C— allyl, 2′-hydroxyl, or 2′-fluoro. For example, each nucleotide of the sense strand and antisense strand is independently modified with 2′-O-methyl or 2′-fluoro. Each X, Y, Z, X′, Y′ and Z′, in particular, may represent a 2′-O-methyl modification or a 2′-fluoro modification.

[0370] In one embodiment, the sense strand of the RNAi agent may contain YYY motif occurring at 9, 10 and 11 positions of the strand when the duplex region is 21 nt, the count starting from the 1′ nucleotide from the 5′-end, or optionally, the count starting at the 1′ paired nucleotide within the duplex region, from the 5′-end; and Y represents 2′-F modification. The sense strand may additionally contain XXX motif or ZZZ motifs as wing modifications at the opposite end of the duplex region; and XXX and ZZZ each independently represents a 2′-OMe modification or 2′-F modification.

[0371] In one embodiment the antisense strand may contain Y′Y′Y′ motif occurring at positions 11, 12, 13 of the strand, the count starting from the 1′ nucleotide from the 5′-end, or optionally, the count starting at the 1^{st} paired nucleotide within the duplex region, from the 5′-end; and Y′ represents 2′-O-methyl modification. The antisense strand may additionally contain X′X′X′ motif or Z′Z′Z′ motifs as wing modifications at the opposite end of the duplex region; and X′X′X′ and Z′Z′Z′ each independently represents a 2′-OMe modification or 2′-F modification.

[0372] The sense strand represented by any one of the above formulas (Ia), (Ib), (Ic), and (Id) forms a duplex with an antisense strand being represented by any one of formulas (Ie), (If), (Ig), and (Ih), respectively.

[0373] Accordingly, the RNAi agents for use in the methods of the disclosure may comprise a sense strand and an antisense strand, each strand having 14 to 30 nucleotides, the RNAi duplex represented by formula (Ii):

sense:5′nₚ-Nₐ—(X X X)ᵢ-N_{b}-Y Y Y-N_{b}—(Z Z Z)ⱼ-Nₐ-n_{q}3′

antisense:3′nₚ-Nₐ—(X′X′X′)ₖ-N_{b}-Y′Y′Y′-N_{b}—(Z′Z′Z′)ₗNₐ-n_{q}5′ (Ii)
[0374] wherein:
[0375] i, j, k, and 1 are each independently 0 or 1;
[0376] p, p′, q, and q′ are each independently 0-6;
[0377] each Nₐ and Nₐ′ independently represents an oligonucleotide sequence comprising 0-25 modified nucleotides, each sequence comprising at least two differently modified nucleotides; each N_{b} and N_{b} independently represents an oligonucleotide sequence comprising 0-10 modified nucleotides;
[0378] wherein
[0379] each nₚ′, nₚ, n_{q}′, and n_{q}, each of which may or may not be present, independently represents an overhang nucleotide; and
[0380] XXX, YYY, ZZZ, X′X′X′, Y′Y′Y′, and Z′Z′Z′ each independently represent one motif of three identical modifications on three consecutive nucleotides.

[0381] In one embodiment, i is 0 and j is 0; or i is 1 and j is 0; or i is 0 and j is 1; or both i and j are 0; or both i and j are 1. In another embodiment, k is 0 and 1 is 0; or k is 1 and 1 is 0; k is 0 and 1 is 1; or both k and 1 are 0; or both k and 1 are 1.

[0382] Exemplary combinations of the sense strand and antisense strand forming an RNAi duplex include the formulas below:

5′nₚ-Nₐ-Y Y Y-Nₐ-n_{q}3′

3′nₚ-Nₐ-Y′Y′Y′-Nₐn_{q}5′(Ij)

5′nₚ-Nₐ-Y Y Y-N_{b}-Z Z Z-Nₐ-n_{q}3′

3′nₚ-Nₐ-Y′Y′Y′-N_{b}-Z′Z′Z′-Nₐn_{q}5′(Ik)

5′nₚ-NₐX X X-N_{b}-Y Y Y-Nₐ-n_{g}3′

3′nₚ-Nₐ-X′X′X′-N_{b}-Y′Y′Y′-Nₐ-n_{q}5′(Il)

5′nₚ-Nₐ-X X X-N_{b}-Y Y Y-N_{b}-Z Z Z-Nₐ-n_{q}3′

3′nₚ-Nₐ-X′X′X′-N_{b}-Y′Y′Y′-N_{b}-Z′Z′Z′-Nₐ-n_{q}5′(Im)

When the RNAi agent is represented by formula (Ij), each Nₐ independently represents an oligonucleotide sequence comprising 2-20, 2-15, or 2-10 modified nucleotides.

[0383] When the RNAi agent is represented by formula (Ik), each N_{b} independently represents an oligonucleotide sequence comprising 1-10, 1-7, 1-5 or 1-4 modified nucleotides. Each Nₐ independently represents an oligonucleotide sequence comprising 2-20, 2-15, or 2-10 modified nucleotides.

[0384] When the RNAi agent is represented as formula (I1), each N_{b}, N_{b}′ independently represents an oligonucleotide sequence comprising 0-10, 0-7, 0-10, 0-7, 0-5, 0-4, 0-2 or 0 modified nucleotides. Each Nₐ independently represents an oligonucleotide sequence comprising 2-20, 2-15, or 2-10 modified nucleotides.

[0385] When the RNAi agent is represented as formula (Im), each N_{b}, N_{b}′ independently represents an oligonucleotide sequence comprising 0-10, 0-7, 0-10, 0-7, 0-5, 0-4, 0-2 or 0 modified nucleotides. Each Nₐ, Nₐ independently represents an oligonucleotide sequence comprising 2-20, 2-15, or 2-10 modified nucleotides. Each of Nₐ, Nₐ′, N_{b} and N_{b} independently comprises modifications of alternating pattern.

[0386] In one embodiment, when the RNAi agent is represented by formula (Im), the Nₐ modifications are 2′-O-methyl or 2′-fluoro modifications. In another embodiment, when the RNAi agent is represented by formula (Im), the Nₐ modifications are 2′-O-methyl or 2′-fluoro modifications and nₚ′ >0 and at least one nₚ′ is linked to a neighboring nucleotide a via phosphorothioate linkage. In yet another embodiment, when the RNAi agent is represented by formula (Im), the Nₐ modifications are 2′-O-methyl or 2′-fluoro modifications, nₚ′ >0 and at least one nₚ′ is linked to a neighboring nucleotide via phosphorothioate linkage, and the sense strand is conjugated to one or more C16 (or related) moieties attached through a bivalent or trivalent branched linker (described below). In another embodiment, when the RNAi agent is represented by formula (Im), the Nₐ modifications are 2′-O-methyl or 2′-fluoro modifications, nₚ′ >0 and at least one nₚ′ is linked to a neighboring nucleotide via phosphorothioate linkage, the sense strand comprises at least one phosphorothioate linkage, and the sense strand is conjugated to one or more lipophilic, e.g., C16 (or related) moieties, optionally attached through a bivalent or trivalent branched linker.

[0387] In one embodiment, when the RNAi agent is represented by formula (Ij), the Nₐ modifications are 2′-O-methyl or 2′-fluoro modifications, nₚ′ >0 and at least one nₚ′ is linked to a neighboring nucleotide via phosphorothioate linkage, the sense strand comprises at least one phosphorothioate linkage, and the sense strand is conjugated to one or more lipophilic, e.g., C16 (or related) moieties attached through a bivalent or trivalent branched linker.

[0388] In one embodiment, the RNAi agent is a multimer containing at least two duplexes represented by formula (Ii), (Ij), (Ik), (Il), and (Im), wherein the duplexes are connected by a linker. The linker can be cleavable or non-cleavable. Optionally, the multimer further comprises a ligand. Each of the duplexes can target the same gene or two different genes; or each of the duplexes can target same gene at two different target sites.

[0389] In one embodiment, the RNAi agent is a multimer containing three, four, five, six or more duplexes represented by formula (Ii), (Ij), (Ik), (Il), and (Im), wherein the duplexes are connected by a linker. The linker can be cleavable or non-cleavable. Optionally, the multimer further comprises a ligand. Each of the duplexes can target the same gene or two different genes; or each of the duplexes can target same gene at two different target sites.

[0390] In one embodiment, two RNAi agents represented by formula (Ii), (Ij), (Ik), (Il), and (Im) are linked to each other at the 5′ end, and one or both of the 3′ ends and are optionally conjugated to a ligand. Each of the agents can target the same gene or two different genes; or each of the agents can target same gene at two different target sites.

[0391] Various publications describe multimeric RNAi agents that can be used in the methods of the disclosure. Such publications include WO2007/091269, WO2010/141511, WO2007/117686, WO2009/014887, and WO2011/031520; and U.S. Pat. No. 7,858,769, the entire contents of each of which are hereby incorporated herein by reference.

[0392] In certain embodiments, the compositions and methods of the disclosure include a vinyl phosphonate (VP) modification of an RNAi agent as described herein. In exemplary embodiments, a 5′-vinyl phosphonate modified nucleotide of the disclosure has the structure:

[chemical structure]

[0393] wherein X is O or S;
[0394] R is hydrogen, hydroxy, fluoro, or C₁₋₂₀alkoxy (e.g., methoxy or n-hexadecyloxy);
[0395] R^{5′} is ═C(H)—P(O)(OH)₂ and the double bond between the C5′ carbon and R5′ is in the E or Z orientation (e.g., E orientation); and
[0396] B is a nucleobase or a modified nucleobase, optionally where B is adenine, guanine, cytosine, thymine, or uracil.

[0397] In one embodiment, R^{5′} is ═C(H)—P(O)(OH)₂ and the double bond between the C5′ carbon and R5′ is in the E orientation. In another embodiment, R is methoxy and R^{5′} is ═C(H)—P(O)(OH)₂ and the double bond between the C5′ carbon and R5′ is in the E orientation. In another embodiment, X is S, R is methoxy, and R^{5′} is ═C(H)—P(O)(OH)₂ and the double bond between the C5′ carbon and R5′ is in the E orientation.

[0398] A vinyl phosphonate of the instant disclosure may be attached to either the antisense or the sense strand of a dsRNA of the disclosure. In certain preferred embodiments, a vinyl phosphonate of the instant disclosure is attached to the antisense strand of a dsRNA, optionally at the 5′ end of the antisense strand of the dsRNA.

[0399] Vinyl phosphate modifications are also contemplated for the compositions and methods of the instant disclosure. An exemplary vinyl phosphate structure includes the preceding structure, where R^{5′} is ═C(H)—OP(O)(OH)₂ and the double bond between the C5′ carbon and R^{5′} is in the E or Z orientation (e.g., E orientation).

i. Thermally Destabilizing Modifications

[0400] In certain embodiments, a dsRNA molecule can be optimized for RNA interference by incorporating thermally destabilizing modifications in the seed region of the antisense strand (i.e., at positions 2-9 of the 5′-end of the antisense strand) to reduce or inhibit off-target gene silencing. It has been discovered that dsRNAs with an antisense strand comprising at least one thermally destabilizing modification of the duplex within the first 9 nucleotide positions, counting from the 5′ end, of the antisense strand have reduced off-target gene silencing activity. Accordingly, in some embodiments, the antisense strand comprises at least one (e.g., one, two, three, four, five or more) thermally destabilizing modification of the duplex within the first 9 nucleotide positions of the 5′ region of the antisense strand. In some embodiments, one or more thermally destabilizing modification(s) of the duplex is/are located in positions 2-9, or preferably positions 4-8, from the 5′-end of the antisense strand. In some further embodiments, the thermally destabilizing modification(s) of the duplex is/are located at position 6, 7 or 8 from the 5′-end of the antisense strand. In still some further embodiments, the thermally destabilizing modification of the duplex is located at position 7 from the 5′-end of the antisense strand. The term “thermally destabilizing modification(s)” includes modification(s) that would result with a dsRNA with a lower overall melting temperature (Tm) (preferably a Tm with one, two, three or four degrees lower than the Tm of the dsRNA without having such modification(s). In some embodiments, the thermally destabilizing modification of the duplex is located at position 2, 3, 4, 5 or 9 from the 5′-end of the antisense strand.

[0401] The thermally destabilizing modifications can include, but are not limited to, abasic modification; mismatch with the opposing nucleotide in the opposing strand; and sugar modification such as 2′-deoxy modification or acyclic nucleotide, e.g., unlocked nucleic acids (UNA) or glycol nucleic acid (GNA).

[0402] Exemplified abasic modifications include but are not limited to the following

[chemical structure]

[0403] Wherein R═H, Me, Et or OMe; R′═H, Me, Et or OMe; R″═H, Me, Et or OMe

[chemical structure]

[0404] wherein B is a modified or unmodified nucleobase.

[0405] Exemplified sugar modifications include, but are not limited to the following:

[chemical structure]

[0406] wherein B is a modified or unmodified nucleobase.

[0407] In some embodiments the thermally destabilizing modification of the duplex is selected from the group consisting of:

[chemical structure]

[0408] wherein B is a modified or unmodified nucleobase and the asterisk on each structure represents either R, S or racemic.

[0409] In some embodiments the thermally destabilizing modification of the duplex is selected from the group consisting of:

[chemical structure]

[0410] wherein B is a modified or unmodified nucleobase and the asterisk represents either R, S or racemic (e.g. S).

[0411] The term “acyclic nucleotide” refers to any nucleotide having an acyclic ribose sugar, for example, where any of bonds between the ribose carbons (e.g., C1′-C2′, C2′-C3′, C3′-C4′, C4′-O4′, or C1′-O4′) is absent or at least one of ribose carbons or oxygen (e.g., C1′, C2′, C3′, C4′ or O4′) are independently or in combination absent from the nucleotide. In some embodiments, acyclic nucleotide is

[chemical structure]

wherein B is a modified or unmodified nucleobase, R¹ and R² independently are H, halogen, OR₃, or alkyl; and R₃ is H, alkyl, cycloalkyl, aryl, aralkyl, heteroaryl or sugar). The acyclic derivative provides greater backbone flexibility without affecting the Watson-Crick pairings. The acyclic nucleotide can be linked via 2′-5′ or 3′-5′ linkage.

[0412] The term ‘GNA’ refers to glycol nucleic acid which is a polymer similar to DNA or RNA but differing in the composition of its “backbone” in that is composed of repeating glycerol units linked by phosphodiester bonds:

[chemical structure]

[0413] The thermally destabilizing modification of the duplex can be mismatches (i.e., noncomplementary base pairs) between the thermally destabilizing nucleotide and the opposing nucleotide in the opposite strand within the dsRNA duplex. Ex emplary mismatch base pairs include G:G, G:A, G:U, G:T, A:A, A:C, C:C, C:U, C:T, U:U, T:T, U:T, or a combination thereof. Other mismatch base pairings known in the art are also amenable to the present disclosure. A mismatch can occur between nucleotides that are either naturally occurring nucleotides or modified nucleotides, i.e., the mismatch base pairing can occur between the nucleobases from respective nucleotides independent of the modifications on the ribose sugars of the nucleotides. In certain embodiments, the dsRNA molecule contains at least one nucleobase in the mismatch pairing that is a 2′-deoxy nucleobase; e.g., the 2′-deoxy nucleobase is in the sense strand.

[0414] In some embodiments, the thermally destabilizing modification of the duplex in the seed region of the antisense strand includes nucleotides with impaired W—C H-bonding to complementary base on the target mRNA, such as:

[chemical structure]

[0415] More examples of abasic nucleotide, acyclic nucleotide modifications (including UNA and GNA), and mismatch modifications have been described in detail in WO 2011/133876, which is herein incorporated by reference in its entirety.

The thermally destabilizing modifications may also include universal base with reduced or abolished capability to form hydrogen bonds with the opposing bases, and phosphate modifications.

[0416] In some embodiments, the thermally destabilizing modification of the duplex includes nucleotides with non-canonical bases such as, but not limited to, nucleobase modifications with impaired or completely abolished capability to form hydrogen bonds with bases in the opposite strand. These nucleobase modifications have been evaluated for destabilization of the central region of the dsRNA duplex as described in WO 2010/0011895, which is herein incorporated by reference in its entirety.

Exemplary nucleobase modifications are:

[chemical structure]

[0417] In some embodiments, the thermally destabilizing modification of the duplex in the seed region of the antisense strand includes one or more α-nucleotide complementary to the base on the target mRNA, such as:

[chemical structure]

[0418] wherein R is H, OH, OCH₃, F, NH₂, NHMe, NMe₂ or O-alkyl.

[0419] Exemplary phosphate modifications known to decrease the thermal stability of dsRNA duplexes compared to natural phosphodiester linkages are:

[chemical structure]

[0420] The alkyl for the R group can be a C₁-C₆alkyl. Specific alkyls for the R group include, but are not limited to methyl, ethyl, propyl, isopropyl, butyl, pentyl and hexyl.

[0421] As the skilled artisan will recognize, in view of the functional role of nucleobases is defining specificity of an RNAi agent of the disclosure, while nucleobase modifications can be performed in the various manners as described herein, e.g., to introduce destabilizing modifications into an RNAi agent of the disclosure, e.g., for purpose of enhancing on-target effect relative to off-target effect, the range of modifications available and, in general, present upon RNAi agents of the disclosure tends to be much greater for non-nucleobase modifications, e.g., modifications to sugar groups or phosphate backbones of polyribonucleotides. Such modifications are described in greater detail in other sections of the instant disclosure and are expressly contemplated for RNAi agents of the disclosure, either possessing native nucleobases or modified nucleobases as described above or elsewhere herein.

[0422] In addition to the antisense strand comprising a thermally destabilizing modification, the dsRNA can also comprise one or more stabilizing modifications. For example, the dsRNA can comprise at least two (e.g., two, three, four, five, six, seven, eight, nine, ten or more) stabilizing modifications. Without limitations, the stabilizing modifications all can be present in one strand. In some embodiments, both the sense and the antisense strands comprise at least two stabilizing modifications. The stabilizing modification can occur on any nucleotide of the sense strand or antisense strand. For instance, the stabilizing modification can occur on every nucleotide on the sense strand or antisense strand; each stabilizing modification can occur in an alternating pattern on the sense strand or antisense strand; or the sense strand or antisense strand comprises both stabilizing modification in an alternating pattern. The alternating pattern of the stabilizing modifications on the sense strand may be the same or different from the antisense strand, and the alternating pattern of the stabilizing modifications on the sense strand can have a shift relative to the alternating pattern of the stabilizing modifications on the antisense strand.

[0423] In some embodiments, the antisense strand comprises at least two (e.g., two, three, four, five, six, seven, eight, nine, ten or more) stabilizing modifications. Without limitations, a stabilizing modification in the antisense strand can be present at any positions. In some embodiments, the antisense comprises stabilizing modifications at positions 2, 6, 8, 9, 14, and 16 from the 5′-end. In some other embodiments, the antisense comprises stabilizing modifications at positions 2, 6, 14, and 16 from the 5′-end. In still some other embodiments, the antisense comprises stabilizing modifications at positions 2, 14, and 16 from the 5′-end.

[0424] In some embodiments, the antisense strand comprises at least one stabilizing modification adjacent to the destabilizing modification. For example, the stabilizing modification can be the nucleotide at the 5′-end or the 3′-end of the destabilizing modification, i.e., at position −1 or +1 from the position of the destabilizing modification. In some embodiments, the antisense strand comprises a stabilizing modification at each of the 5′-end and the 3′-end of the destabilizing modification, i.e., positions −1 and +1 from the position of the destabilizing modification.

[0425] In some embodiments, the antisense strand comprises at least two stabilizing modifications at the 3′-end of the destabilizing modification, i.e., at positions +1 and +2 from the position of the destabilizing modification.

[0426] In some embodiments, the sense strand comprises at least two (e.g., two, three, four, five, six, seven, eight, nine, ten or more) stabilizing modifications. Without limitations, a stabilizing modification in the sense strand can be present at any positions. In some embodiments, the sense strand comprises stabilizing modifications at positions 7, 10, and 11 from the 5′-end. In some other embodiments, the sense strand comprises stabilizing modifications at positions 7, 9, 10, and 11 from the 5′-end. In some embodiments, the sense strand comprises stabilizing modifications at positions opposite or complementary to positions 11, 12, and 15 of the antisense strand, counting from the 5′-end of the antisense strand. In some other embodiments, the sense strand comprises stabilizing modifications at positions opposite or complementary to positions 11, 12, 13, and 15 of the antisense strand, counting from the 5′-end of the antisense strand. In some embodiments, the sense strand comprises a block of two, three, or four stabilizing modifications.

[0427] In some embodiments, the sense strand does not comprise a stabilizing modification in position opposite or complementary to the thermally destabilizing modification of the duplex in the antisense strand.

[0428] Exemplary thermally stabilizing modifications include, but are not limited to, 2′-fluoro modifications. Other thermally stabilizing modifications include, but are not limited to, LNA.

[0429] In some embodiments, the dsRNA of the disclosure comprises at least four (e.g., four, five, six, seven, eight, nine, ten, or more) 2′-fluoro nucleotides. Without limitations, the 2′-fluoro nucleotides all can be present in one strand. In some embodiments, both the sense and the antisense strands comprise at least two 2′-fluoro nucleotides. The 2′-fluoro modification can occur on any nucleotide of the sense strand or antisense strand. For instance, the 2′-fluoro modification can occur on every nucleotide on the sense strand or antisense strand; each 2′-fluoro modification can occur in an alternating pattern on the sense strand or antisense strand; or the sense strand or antisense strand comprises both 2′-fluoro modifications in an alternating pattern. The alternating pattern of the 2′-fluoro modifications on the sense strand may be the same or different from the antisense strand, and the alternating pattern of the 2′-fluoro modifications on the sense strand can have a shift relative to the alternating pattern of the 2′-fluoro modifications on the antisense strand.

[0430] In some embodiments, the antisense strand comprises at least two (e.g., two, three, four, five, six, seven, eight, nine, ten, or more) 2′-fluoro nucleotides. Without limitations, a 2′-fluoro modification in the antisense strand can be present at any positions. In some embodiments, the antisense comprises 2′-fluoro nucleotides at positions 2, 6, 8, 9, 14, and 16 from the 5′-end. In some other embodiments, the antisense comprises 2′-fluoro nucleotides at positions 2, 6, 14, and 16 from the 5′-end. In still some other embodiments, the antisense comprises 2′-fluoro nucleotides at positions 2, 14, and 16 from the 5′-end.

[0431] In some embodiments, the antisense strand comprises at least one 2′-fluoro nucleotide adjacent to the destabilizing modification. For example, the 2′-fluoro nucleotide can be the nucleotide at the 5′-end or the 3′-end of the destabilizing modification, i.e., at position −1 or +1 from the position of the destabilizing modification. In some embodiments, the antisense strand comprises a 2′-fluoro nucleotide at each of the 5′-end and the 3′-end of the destabilizing modification, i.e., positions −1 and +1 from the position of the destabilizing modification.

[0432] In some embodiments, the antisense strand comprises at least two 2′-fluoro nucleotides at the 3′-end of the destabilizing modification, i.e., at positions +1 and +2 from the position of the destabilizing modification.

[0433] In some embodiments, the sense strand comprises at least two (e.g., two, three, four, five, six, seven, eight, nine, ten or more) 2′-fluoro nucleotides. Without limitations, a 2′-fluoro modification in the sense strand can be present at any positions. In some embodiments, the antisense comprises 2′-fluoro nucleotides at positions 7, 10, and 11 from the 5′-end. In some other embodiments, the sense strand comprises 2′-fluoro nucleotides at positions 7, 9, 10, and 11 from the 5′-end. In some embodiments, the sense strand comprises 2′-fluoro nucleotides at positions opposite or complementary to positions 11, 12, and 15 of the antisense strand, counting from the 5′-end of the antisense strand. In some other embodiments, the sense strand comprises 2′-fluoro nucleotides at positions opposite or complementary to positions 11, 12, 13, and 15 of the antisense strand, counting from the 5′-end of the antisense strand. In some embodiments, the sense strand comprises a block of two, three or four 2′-fluoro nucleotides.

[0434] In some embodiments, the sense strand does not comprise a 2′-fluoro nucleotide in position opposite or complementary to the thermally destabilizing modification of the duplex in the antisense strand.

[0435] In some embodiments, the dsRNA molecule of the disclosure comprises a 21 nucleotides (nt) sense strand and a 23 nucleotides (nt) antisense, wherein the antisense strand contains at least one thermally destabilizing nucleotide, where the at least one thermally destabilizing nucleotide occurs in the seed region of the antisense strand (i.e., at position 2-9 of the 5′-end of the antisense strand), wherein one end of the dsRNA is blunt, while the other end is comprises a 2 nt overhang, and wherein the dsRNA optionally further has at least one (e.g., one, two, three, four, five, six or all seven) of the following characteristics: (i) the antisense comprises 2, 3, 4, 5 or 6 2′-fluoro modifications; (ii) the antisense comprises 1, 2, 3, 4 or 5 phosphorothioate internucleotide linkages; (iii) the sense strand is conjugated with a ligand; (iv) the sense strand comprises 2, 3, 4 or 5 2′-fluoro modifications; (v) the sense strand comprises 1, 2, 3, 4 or 5 phosphorothioate internucleotide linkages; (vi) the dsRNA comprises at least four 2′-fluoro modifications; and (vii) the dsRNA comprises a blunt end at 5′-end of the antisense strand. Preferably, the 2 nt overhang is at the 3′-end of the antisense.

[0436] In some embodiments, the dsRNA molecule of the disclosure comprising a sense and antisense strands, wherein: the sense strand is 25-30 nucleotide residues in length, wherein starting from the 5′ terminal nucleotide (position 1), positions 1 to 23 of said sense strand comprise at least 8 ribonucleotides; antisense strand is 36-66 nucleotide residues in length and, starting from the 3′ terminal nucleotide, at least 8 ribonucleotides in the positions paired with positions 1-23 of sense strand to form a duplex; wherein at least the 3′ terminal nucleotide of antisense strand is unpaired with sense strand, and up to 6 consecutive 3′ terminal nucleotides are unpaired with sense strand, thereby forming a 3′ single stranded overhang of 1-6 nucleotides; wherein the 5′ terminus of antisense strand comprises from 10-30 consecutive nucleotides which are unpaired with sense strand, thereby forming a 10-30 nucleotide single stranded 5′ overhang; wherein at least the sense strand 5′ terminal and 3′ terminal nucleotides are base paired with nucleotides of antisense strand when sense and antisense strands are aligned for maximum complementarity, thereby forming a substantially duplexed region between sense and antisense strands; and antisense strand is sufficiently complementary to a target RNA along at least 19 ribonucleotides of antisense strand length to reduce target gene expression when said double stranded nucleic acid is introduced into a mammalian cell; and wherein the antisense strand contains at least one thermally destabilizing nucleotide, where at least one thermally destabilizing nucleotide is in the seed region of the antisense strand (i.e. at position 2-9 of the 5′-end of the antisense strand). For example, the thermally destabilizing nucleotide occurs between positions opposite or complementary to positions 14-17 of the 5′-end of the sense strand, and wherein the dsRNA optionally further has at least one (e.g., one, two, three, four, five, six or all seven) of the following characteristics: (i) the antisense comprises 2, 3, 4, 5, or 6 2′-fluoro modifications; (ii) the antisense comprises 1, 2, 3, 4, or 5 phosphorothioate internucleotide linkages; (iii) the sense strand is conjugated with a ligand; (iv) the sense strand comprises 2, 3, 4, or 5 2′-fluoro modifications; (v) the sense strand comprises 1, 2, 3, 4, or 5 phosphorothioate internucleotide linkages; and (vi) the dsRNA comprises at least four 2′-fluoro modifications; and (vii) the dsRNA comprises a duplex region of 12-30 nucleotide pairs in length.

[0437] In some embodiments, the dsRNA molecule of the disclosure comprises a sense and antisense strands, wherein said dsRNA molecule comprises a sense strand having a length which is at least 25 and at most 29 nucleotides and an antisense strand having a length which is at most 30 nucleotides with the sense strand comprises a modified nucleotide that is susceptible to enzymatic degradation at position 11 from the 5′end, wherein the 3′ end of said sense strand and the 5′ end of said antisense strand form a blunt end and said antisense strand is 1-4 nucleotides longer at its 3′ end than the sense strand, wherein the duplex region which is at least 25 nucleotides in length, and said antisense strand is sufficiently complementary to a target mRNA along at least 19 nt of said antisense strand length to reduce target gene expression when said dsRNA molecule is introduced into a mammalian cell, and wherein dicer cleavage of said dsRNA preferentially results in an siRNA comprising said 3′ end of said antisense strand, thereby reducing expression of the target gene in the mammal, wherein the antisense strand contains at least one thermally destabilizing nucleotide, where the at least one thermally destabilizing nucleotide is in the seed region of the antisense strand (i.e. at position 2-9 of the 5′-end of the antisense strand), and wherein the dsRNA optionally further has at least one (e.g., one, two, three, four, five, six or all seven) of the following characteristics: (i) the antisense comprises 2, 3, 4, 5, or 6 2′-fluoro modifications; (ii) the antisense comprises 1, 2, 3, 4, or 5 phosphorothioate internucleotide linkages; (iii) the sense strand is conjugated with a ligand; (iv) the sense strand comprises 2, 3, 4, or 5 2′-fluoro modifications; (v) the sense strand comprises 1, 2, 3, 4, or 5 phosphorothioate internucleotide linkages; and (vi) the dsRNA comprises at least four 2′-fluoro modifications; and (vii) the dsRNA has a duplex region of 12-29 nucleotide pairs in length.

[0438] In some embodiments, every nucleotide in the sense strand and antisense strand of the dsRNA molecule may be modified. Each nucleotide may be modified with the same or different modification which can include one or more alteration of one or both of the non-linking phosphate oxygens or of one or more of the linking phosphate oxygens; alteration of a constituent of the ribose sugar, e.g., of the 2′ hydroxyl on the ribose sugar; wholesale replacement of the phosphate moiety with “dephospho” linkers; modification or replacement of a naturally occurring base; and replacement or modification of the ribose-phosphate backbone.

[0439] As nucleic acids are polymers of subunits, many of the modifications occur at a position which is repeated within a nucleic acid, e.g., a modification of a base, or a phosphate moiety, or a non-linking O of a phosphate moiety. In some cases, the modification will occur at all of the subject positions in the nucleic acid but in many cases it will not. By way of example, a modification may only occur at a 3′ or 5′ terminal position, may only occur in a terminal region, e.g., at a position on a terminal nucleotide or in the last 2, 3, 4, 5, or 10 nucleotides of a strand. A modification may occur in a double strand region, a single strand region, or in both. A modification may occur only in the double strand region of an RNA or may only occur in a single strand region of an RNA. E.g., a phosphorothioate modification at a non-linking O position may only occur at one or both termini, may only occur in a terminal region, e.g., at a position on a terminal nucleotide or in the last 2, 3, 4, 5, or 10 nucleotides of a strand, or may occur in double strand and single strand regions, particularly at termini. The 5′ end or ends can be phosphorylated.

[0440] It may be possible, e.g., to enhance stability, to include particular bases in overhangs, or to include modified nucleotides or nucleotide surrogates, in single strand overhangs, e.g., in a 5′ or 3′ overhang, or in both. E.g., it can be desirable to include purine nucleotides in overhangs. In some embodiments all or some of the bases in a 3′ or 5′ overhang may be modified, e.g., with a modification described herein. Modifications can include, e.g., the use of modifications at the 2′ position of the ribose sugar with modifications that are known in the art, e.g., the use of deoxyribonucleotides, 2′-deoxy-2′-fluoro (2′-F) or 2′-O-methyl modified instead of the ribosugar of the nucleobase, and modifications in the phosphate group, e.g., phosphorothioate modifications. Overhangs need not be homologous with the target sequence.

[0441] In some embodiments, each residue of the sense strand and antisense strand is independently modified with locked nucleic acid (LNA), unlocked nucleic acid (UNA), cyclohexene nucleic acid (CeNA), 2′-methoxyethyl, 2′-O-methyl, 2′-O-allyl, 2′-C— allyl, 2′-deoxy, or 2′-fluoro. The strands can contain more than one modification. In some embodiments, each residue of the sense strand and antisense strand is independently modified with 2′-O-methyl or 2′-fluoro. It is to be understood that these modifications are in addition to the at least one thermally destabilizing modification of the duplex present in the antisense strand.

[0442] At least two different modifications are typically present on the sense strand and antisense strand. Those two modifications may be the 2′-deoxy, 2′-O-methyl or 2′-fluoro modifications, acyclic nucleotides or others. In some embodiments, the sense strand and antisense strand each comprises two differently modified nucleotides selected from 2′-O-methyl or 2′-deoxy. In some embodiments, each residue of the sense strand and antisense strand is independently modified with 2′-O-methyl nucleotide, 2′-deoxy nucleotide, 2′-deoxy-2′-fluoro nucleotide, 2′-O—N-methylacetamido (2′-O-NMA) nucleotide, a 2′-O-dimethylaminoethoxyethyl (2′-O-DMAEOE) nucleotide, 2′-O-aminopropyl (2′-O-AP) nucleotide, or 2′-ara-F nucleotide. Again, it is to be understood that these modifications are in addition to the at least one thermally destabilizing modification of the duplex present in the antisense strand.

[0443] In some embodiments, the dsRNA molecule of the disclosure comprises modifications of an alternating pattern, particular in the B1, B2, B3, B1′, B2′, B3′, B4′ regions. The term “alternating motif” or “alternative pattern” as used herein refers to a motif having one or more modifications, each modification occurring on alternating nucleotides of one strand. The alternating nucleotide may refer to one per every other nucleotide or one per every three nucleotides, or a similar pattern. For example, if A, B and C each represent one type of modification to the nucleotide, the alternating motif can be “ABABABABABAB . . . ,” “AABBAABBAABB . . . ,” “AABAABAABAAB . . . ,” “AAABAAABAAAB . . . ,” “AAABBBAAABBB . . . ,” or “ABCABCABCABC . . . ,” etc.

[0444] The type of modifications contained in the alternating motif may be the same or different. For example, if A, B, C, D each represent one type of modification on the nucleotide, the alternating pattern, i.e., modifications on every other nucleotide, may be the same, but each of the sense strand or antisense strand can be selected from several possibilities of modifications within the alternating motif such as “ABABAB . . . ”, “ACACAC . . . ” “BDBDBD . . . ” or “CDCDCD . . . ,” etc.

[0445] In some embodiments, the dsRNA molecule of the disclosure comprises the modification pattern for the alternating motif on the sense strand relative to the modification pattern for the alternating motif on the antisense strand is shifted. The shift may be such that the modified group of nucleotides of the sense strand corresponds to a differently modified group of nucleotides of the antisense strand and vice versa. For example, the sense strand when paired with the antisense strand in the dsRNA duplex, the alternating motif in the sense strand may start with “ABABAB” from 5′-3′ of the strand and the alternating motif in the antisense strand may start with “BABABA” from 3′-5′ of the strand within the duplex region. As another example, the alternating motif in the sense strand may start with “AABBAABB” from 5′-3′ of the strand and the alternating motif in the antisense strand may start with “BBAABBAA” from 3′-5′ of the strand within the duplex region, so that there is a complete or partial shift of the modification patterns between the sense strand and the antisense strand.

[0446] The dsRNA molecule of the disclosure may further comprise at least one phosphorothioate or methylphosphonate internucleotide linkage. The phosphorothioate or methylphosphonate internucleotide linkage modification may occur on any nucleotide of the sense strand or antisense strand or both in any position of the strand. For instance, the internucleotide linkage modification may occur on every nucleotide on the sense strand or antisense strand; each internucleotide linkage modification may occur in an alternating pattern on the sense strand or antisense strand; or the sense strand or antisense strand comprises both internucleotide linkage modifications in an alternating pattern. The alternating pattern of the internucleotide linkage modification on the sense strand may be the same or different from the antisense strand, and the alternating pattern of the internucleotide linkage modification on the sense strand may have a shift relative to the alternating pattern of the internucleotide linkage modification on the antisense strand.

[0447] In some embodiments, the dsRNA molecule comprises the phosphorothioate or methylphosphonate internucleotide linkage modification in the overhang region. For example, the overhang region comprises two nucleotides having a phosphorothioate or methylphosphonate internucleotide linkage between the two nucleotides. Internucleotide linkage modifications also may be made to link the overhang nucleotides with the terminal paired nucleotides within duplex region. For example, at least 2, 3, 4, or all the overhang nucleotides may be linked through phosphorothioate or methylphosphonate internucleotide linkage, and optionally, there may be additional phosphorothioate or methylphosphonate internucleotide linkages linking the overhang nucleotide with a paired nucleotide that is next to the overhang nucleotide. For instance, there may be at least two phosphorothioate internucleotide linkages between the terminal three nucleotides, in which two of the three nucleotides are overhang nucleotides, and the third is a paired nucleotide next to the overhang nucleotide. Preferably, these terminal three nucleotides may be at the 3′-end of the antisense strand.

[0448] In some embodiments, the sense strand of the dsRNA molecule comprises 1-10 blocks of two to ten phosphorothioate or methylphosphonate internucleotide linkages separated by 1, 2, 3, 4, 5, 6, 7, 8, 9, 10, 11, 12, 13, 14, 15, or 16 phosphate internucleotide linkages, wherein one of the phosphorothioate or methylphosphonate internucleotide linkages is placed at any position in the oligonucleotide sequence and the said sense strand is paired with an antisense strand comprising any combination of phosphorothioate, methylphosphonate and phosphate internucleotide linkages or an antisense strand comprising either phosphorothioate or methylphosphonate or phosphate linkage.

[0449] In some embodiments, the antisense strand of the dsRNA molecule comprises two blocks of two phosphorothioate or methylphosphonate internucleotide linkages separated by 1, 2, 3, 4, 5, 6, 7, 8, 9, 10, 11, 12, 13, 14, 15, 16, 17, or 18 phosphate internucleotide linkages, wherein one of the phosphorothioate or methylphosphonate internucleotide linkages is placed at any position in the oligonucleotide sequence and the said antisense strand is paired with a sense strand comprising any combination of phosphorothioate, methylphosphonate and phosphate internucleotide linkages or an antisense strand comprising either phosphorothioate or methylphosphonate or phosphate linkage.

[0450] In some embodiments, the antisense strand of the dsRNA molecule comprises two blocks of three phosphorothioate or methylphosphonate internucleotide linkages separated by 1, 2, 3, 4, 5, 6, 7, 8, 9, 10, 11, 12, 13, 14, 15, or 16 phosphate internucleotide linkages, wherein one of the phosphorothioate or methylphosphonate internucleotide linkages is placed at any position in the oligonucleotide sequence and the said antisense strand is paired with a sense strand comprising any combination of phosphorothioate, methylphosphonate and phosphate internucleotide linkages or an antisense strand comprising either phosphorothioate or methylphosphonate or phosphate linkage.

[0451] In some embodiments, the antisense strand of the dsRNA molecule comprises two blocks of four phosphorothioate or methylphosphonate internucleotide linkages separated by 1, 2, 3, 4, 5, 6, 7, 8, 9, 10, 11, 12, 13, or 14 phosphate internucleotide linkages, wherein one of the phosphorothioate or methylphosphonate internucleotide linkages is placed at any position in the oligonucleotide sequence and the said antisense strand is paired with a sense strand comprising any combination of phosphorothioate, methylphosphonate and phosphate internucleotide linkages or an antisense strand comprising either phosphorothioate or methylphosphonate or phosphate linkage.

[0452] In some embodiments, the antisense strand of the dsRNA molecule comprises two blocks of five phosphorothioate or methylphosphonate internucleotide linkages separated by 1, 2, 3, 4, 5, 6, 7, 8, 9, 10, 11, or 12 phosphate internucleotide linkages, wherein one of the phosphorothioate or methylphosphonate internucleotide linkages is placed at any position in the oligonucleotide sequence and the said antisense strand is paired with a sense strand comprising any combination of phosphorothioate, methylphosphonate and phosphate internucleotide linkages or an antisense strand comprising either phosphorothioate or methylphosphonate or phosphate linkage.

[0453] In some embodiments, the antisense strand of the dsRNA molecule comprises two blocks of six phosphorothioate or methylphosphonate internucleotide linkages separated by 1, 2, 3, 4, 5, 6, 7, 8, 9, or 10 phosphate internucleotide linkages, wherein one of the phosphorothioate or methylphosphonate internucleotide linkages is placed at any position in the oligonucleotide sequence and the said antisense strand is paired with a sense strand comprising any combination of phosphorothioate, methylphosphonate and phosphate internucleotide linkages or an antisense strand comprising either phosphorothioate or methylphosphonate or phosphate linkage.

[0454] In some embodiments, the antisense strand of the dsRNA molecule comprises two blocks of seven phosphorothioate or methylphosphonate internucleotide linkages separated by 1, 2, 3, 4, 5, 6, 7, or 8 phosphate internucleotide linkages, wherein one of the phosphorothioate or methylphosphonate internucleotide linkages is placed at any position in the oligonucleotide sequence and the said antisense strand is paired with a sense strand comprising any combination of phosphorothioate, methylphosphonate and phosphate internucleotide linkages or an antisense strand comprising either phosphorothioate or methylphosphonate or phosphate linkage.

[0455] In some embodiments, the antisense strand of the dsRNA molecule comprises two blocks of eight phosphorothioate or methylphosphonate internucleotide linkages separated by 1, 2, 3, 4, 5, or 6 phosphate internucleotide linkages, wherein one of the phosphorothioate or methylphosphonate internucleotide linkages is placed at any position in the oligonucleotide sequence and the said antisense strand is paired with a sense strand comprising any combination of phosphorothioate, methylphosphonate and phosphate internucleotide linkages or an antisense strand comprising either phosphorothioate or methylphosphonate or phosphate linkage.

[0456] In some embodiments, the antisense strand of the dsRNA molecule comprises two blocks of nine phosphorothioate or methylphosphonate internucleotide linkages separated by 1, 2, 3, or 4 phosphate internucleotide linkages, wherein one of the phosphorothioate or methylphosphonate internucleotide linkages is placed at any position in the oligonucleotide sequence and the said antisense strand is paired with a sense strand comprising any combination of phosphorothioate, methylphosphonate and phosphate internucleotide linkages or an antisense strand comprising either phosphorothioate or methylphosphonate or phosphate linkage.

[0457] In some embodiments, the dsRNA molecule of the disclosure further comprises one or more phosphorothioate or methylphosphonate internucleotide linkage modification within 1-10 of the termini position(s) of the sense or antisense strand. For example, at least 2, 3, 4, 5, 6, 7, 8, 9, or 10 nucleotides may be linked through phosphorothioate or methylphosphonate internucleotide linkage at one end or both ends of the sense or antisense strand.

[0458] In some embodiments, the dsRNA molecule of the disclosure further comprises one or more phosphorothioate or methylphosphonate internucleotide linkage modification within 1-10 of the internal region of the duplex of each of the sense or antisense strand. For example, at least 2, 3, 4, 5, 6, 7, 8, 9, or 10 nucleotides may be linked through phosphorothioate methylphosphonate internucleotide linkage at position 8-16 of the duplex region counting from the 5′-end of the sense strand; the dsRNA molecule can optionally further comprise one or more phosphorothioate or methylphosphonate internucleotide linkage modification within 1-10 of the termini position(s).

[0459] In some embodiments, the dsRNA molecule of the disclosure further comprises one to five phosphorothioate or methylphosphonate internucleotide linkage modification(s) within position 1-5 and one to five phosphorothioate or methylphosphonate internucleotide linkage modification(s) within position 18-23 of the sense strand (counting from the 5′-end), and one to five phosphorothioate or methylphosphonate internucleotide linkage modifications at positions 1 and 2 and one to five within positions 18-23 of the antisense strand (counting from the 5′-end).

[0460] In some embodiments, the dsRNA molecule of the disclosure further comprises one phosphorothioate internucleotide linkage modification within position 1-5 and one phosphorothioate or methylphosphonate internucleotide linkage modification within position 18-23 of the sense strand (counting from the 5′-end), and one phosphorothioate internucleotide linkage modification at position 1 or 2 and two phosphorothioate or methylphosphonate internucleotide linkage modifications within positions 18-23 of the antisense strand (counting from the 5′-end).

[0461] In some embodiments, the dsRNA molecule of the disclosure further comprises two phosphorothioate internucleotide linkage modifications within position 1-5 and one phosphorothioate internucleotide linkage modification within position 18-23 of the sense strand (counting from the 5′-end), and one phosphorothioate internucleotide linkage modification at position 1 or 2 and two phosphorothioate internucleotide linkage modifications within positions 18-23 of the antisense strand (counting from the 5′-end).

[0462] In some embodiments, the dsRNA molecule of the disclosure further comprises two phosphorothioate internucleotide linkage modifications within position 1-5 and two phosphorothioate internucleotide linkage modifications within position 18-23 of the sense strand (counting from the 5′-end), and one phosphorothioate internucleotide linkage modification at position 1 or 2 and two phosphorothioate internucleotide linkage modifications within positions 18-23 of the antisense strand (counting from the 5′-end).

[0463] In some embodiments, the dsRNA molecule of the disclosure further comprises two phosphorothioate internucleotide linkage modifications within position 1-5 and two phosphorothioate internucleotide linkage modifications within position 18-23 of the sense strand (counting from the 5′-end), and one phosphorothioate internucleotide linkage modification at position 1 or 2 and one phosphorothioate internucleotide linkage modification within positions 18-23 of the antisense strand (counting from the 5′-end).

[0464] In some embodiments, the dsRNA molecule of the disclosure further comprises one phosphorothioate internucleotide linkage modification within position 1-5 and one phosphorothioate internucleotide linkage modification within position 18-23 of the sense strand (counting from the 5′-end), and two phosphorothioate internucleotide linkage modifications at positions 1 and 2 and two phosphorothioate internucleotide linkage modifications within positions 18-23 of the antisense strand (counting from the 5′-end).

[0465] In some embodiments, the dsRNA molecule of the disclosure further comprises one phosphorothioate internucleotide linkage modification within position 1-5 and one within position 18-23 of the sense strand (counting from the 5′-end), and two phosphorothioate internucleotide linkage modifications at positions 1 and 2 and one phosphorothioate internucleotide linkage modification within positions 18-23 of the antisense strand (counting from the 5′-end).

[0466] In some embodiments, the dsRNA molecule of the disclosure further comprises one phosphorothioate internucleotide linkage modification within position 1-5 (counting from the 5′-end) of the sense strand, and two phosphorothioate internucleotide linkage modifications at positions 1 and 2 and one phosphorothioate internucleotide linkage modification within positions 18-23 of the antisense strand (counting from the 5′-end).

[0467] In some embodiments, the dsRNA molecule of the disclosure further comprises two phosphorothioate internucleotide linkage modifications within position 1-5 (counting from the 5′-end) of the sense strand, and one phosphorothioate internucleotide linkage modification at position 1 or 2 and two phosphorothioate internucleotide linkage modifications within positions 18-23 of the antisense strand (counting from the 5′-end).

[0468] In some embodiments, the dsRNA molecule of the disclosure further comprises two phosphorothioate internucleotide linkage modifications within positions 1-5 and one within positions 18-23 of the sense strand (counting from the 5′-end), and two phosphorothioate internucleotide linkage modifications at positions 1 and 2 and one phosphorothioate internucleotide linkage modification within positions 18-23 of the antisense strand (counting from the 5′-end).

[0469] In some embodiments, the dsRNA molecule of the disclosure further comprises two phosphorothioate internucleotide linkage modifications within positions 1-5 and one phosphorothioate internucleotide linkage modification within positions 18-23 of the sense strand (counting from the 5′-end), and two phosphorothioate internucleotide linkage modifications at positions 1 and 2 and two phosphorothioate internucleotide linkage modifications within positions 18-23 of the antisense strand (counting from the 5′-end).

[0470] In some embodiments, the dsRNA molecule of the disclosure further comprises two phosphorothioate internucleotide linkage modifications within positions 1-5 and one phosphorothioate internucleotide linkage modification within positions 18-23 of the sense strand (counting from the 5′-end), and one phosphorothioate internucleotide linkage modification at position 1 or 2 and two phosphorothioate internucleotide linkage modifications within positions 18-23 of the antisense strand (counting from the 5′-end).

[0471] In some embodiments, the dsRNA molecule of the disclosure further comprises two phosphorothioate internucleotide linkage modifications at position 1 and 2, and two phosphorothioate internucleotide linkage modifications at positions 20 and 21 of the sense strand (counting from the 5′-end), and one phosphorothioate internucleotide linkage modification at position 1 and one at position 21 of the antisense strand (counting from the 5′-end).

[0472] In some embodiments, the dsRNA molecule of the disclosure further comprises one phosphorothioate internucleotide linkage modification at position 1, and one phosphorothioate internucleotide linkage modification at position 21 of the sense strand (counting from the 5′-end), and two phosphorothioate internucleotide linkage modifications at positions 1 and 2 and two phosphorothioate internucleotide linkage modifications at positions 20 and 21 the antisense strand (counting from the 5′-end).

[0473] In some embodiments, the dsRNA molecule of the disclosure further comprises two phosphorothioate internucleotide linkage modifications at position 1 and 2, and two phosphorothioate internucleotide linkage modifications at position 21 and 22 of the sense strand (counting from the 5′-end), and one phosphorothioate internucleotide linkage modification at positions 1 and one phosphorothioate internucleotide linkage modification at position 21 of the antisense strand (counting from the 5′-end).

[0474] In some embodiments, the dsRNA molecule of the disclosure further comprises one phosphorothioate internucleotide linkage modification at position 1, and one phosphorothioate internucleotide linkage modification at position 21 of the sense strand (counting from the 5′-end), and two phosphorothioate internucleotide linkage modifications at positions 1 and 2 and two phosphorothioate internucleotide linkage modifications at positions 21 and 22 the antisense strand (counting from the 5′-end).

[0475] In some embodiments, the dsRNA molecule of the disclosure further comprises two phosphorothioate internucleotide linkage modifications at positions 1 and 2, and two phosphorothioate internucleotide linkage modifications at position 22 and 23 of the sense strand (counting from the 5′-end), and one phosphorothioate internucleotide linkage modification at position 1 and one phosphorothioate internucleotide linkage modification at position 21 of the antisense strand (counting from the 5′-end).

[0476] In some embodiments, the dsRNA molecule of the disclosure further comprises one phosphorothioate internucleotide linkage modification at position 1, and one phosphorothioate internucleotide linkage modification at position 21 of the sense strand (counting from the 5′-end), and two phosphorothioate internucleotide linkage modifications at positions 1 and 2 and two phosphorothioate internucleotide linkage modifications at positions 23 and 23 the antisense strand (counting from the 5′-end).

[0477] In some embodiments, compound of the disclosure comprises a pattern of backbone chiral centers. In some embodiments, a common pattern of backbone chiral centers comprises at least 5 internucleotidic linkages in the Sp configuration. In some embodiments, a common pattern of backbone chiral centers comprises at least 6 internucleotidic linkages in the Sp configuration. In some embodiments, a common pattern of backbone chiral centers comprises at least 7 internucleotidic linkages in the Sp configuration. In some embodiments, a common pattern of backbone chiral centers comprises at least 8 internucleotidic linkages in the Sp configuration. In some embodiments, a common pattern of backbone chiral centers comprises at least 9 internucleotidic linkages in the Sp configuration. In some embodiments, a common pattern of backbone chiral centers comprises at least 10 internucleotidic linkages in the Sp configuration. In some embodiments, a common pattern of backbone chiral centers comprises at least 11 internucleotidic linkages in the Sp configuration. In some embodiments, a common pattern of backbone chiral centers comprises at least 12 internucleotidic linkages in the Sp configuration. In some embodiments, a common pattern of backbone chiral centers comprises at least 13 internucleotidic linkages in the Sp configuration. In some embodiments, a common pattern of backbone chiral centers comprises at least 14 internucleotidic linkages in the Sp configuration. In some embodiments, a common pattern of backbone chiral centers comprises at least 15 internucleotidic linkages in the Sp configuration. In some embodiments, a common pattern of backbone chiral centers comprises at least 16 internucleotidic linkages in the Sp configuration. In some embodiments, a common pattern of backbone chiral centers comprises at least 17 internucleotidic linkages in the Sp configuration. In some embodiments, a common pattern of backbone chiral centers comprises at least 18 internucleotidic linkages in the Sp configuration. In some embodiments, a common pattern of backbone chiral centers comprises at least 19 internucleotidic linkages in the Sp configuration. In some embodiments, a common pattern of backbone chiral centers comprises no more than 8 internucleotidic linkages in the Rp configuration. In some embodiments, a common pattern of backbone chiral centers comprises no more than 7 internucleotidic linkages in the Rp configuration. In some embodiments, a common pattern of backbone chiral centers comprises no more than 6 internucleotidic linkages in the Rp configuration. In some embodiments, a common pattern of backbone chiral centers comprises no more than 5 internucleotidic linkages in the Rp configuration. In some embodiments, a common pattern of backbone chiral centers comprises no more than 4 internucleotidic linkages in the Rp configuration. In some embodiments, a common pattern of backbone chiral centers comprises no more than 3 internucleotidic linkages in the Rp configuration. In some embodiments, a common pattern of backbone chiral centers comprises no more than 2 internucleotidic linkages in the Rp configuration. In some embodiments, a common pattern of backbone chiral centers comprises no more than 1 internucleotidic linkages in the Rp configuration. In some embodiments, a common pattern of backbone chiral centers comprises no more than 8 internucleotidic linkages which are not chiral (as a non-limiting example, a phosphodiester). In some embodiments, a common pattern of backbone chiral centers comprises no more than 7 internucleotidic linkages which are not chiral. In some embodiments, a common pattern of backbone chiral centers comprises no more than 6 internucleotidic linkages which are not chiral. In some embodiments, a common pattern of backbone chiral centers comprises no more than 5 internucleotidic linkages which are not chiral. In some embodiments, a common pattern of backbone chiral centers comprises no more than 4 internucleotidic linkages which are not chiral. In some embodiments, a common pattern of backbone chiral centers comprises no more than 3 internucleotidic linkages which are not chiral. In some embodiments, a common pattern of backbone chiral centers comprises no more than 2 internucleotidic linkages which are not chiral. In some embodiments, a common pattern of backbone chiral centers comprises no more than 1 internucleotidic linkages which are not chiral. In some embodiments, a common pattern of backbone chiral centers comprises at least 10 internucleotidic linkages in the Sp configuration, and no more than 8 internucleotidic linkages which are not chiral. In some embodiments, a common pattern of backbone chiral centers comprises at least 11 internucleotidic linkages in the Sp configuration, and no more than 7 internucleotidic linkages which are not chiral. In some embodiments, a common pattern of backbone chiral centers comprises at least 12 internucleotidic linkages in the Sp configuration, and no more than 6 internucleotidic linkages which are not chiral. In some embodiments, a common pattern of backbone chiral centers comprises at least 13 internucleotidic linkages in the Sp configuration, and no more than 6 internucleotidic linkages which are not chiral. In some embodiments, a common pattern of backbone chiral centers comprises at least 14 internucleotidic linkages in the Sp configuration, and no more than 5 internucleotidic linkages which are not chiral. In some embodiments, a common pattern of backbone chiral centers comprises at least 15 internucleotidic linkages in the Sp configuration, and no more than 4 internucleotidic linkages which are not chiral. In some embodiments, the internucleotidic linkages in the Sp configuration are optionally contiguous or not contiguous. In some embodiments, the internucleotidic linkages in the Rp configuration are optionally contiguous or not contiguous. In some embodiments, the internucleotidic linkages which are not chiral are optionally contiguous or not contiguous.

[0478] In some embodiments, compound of the disclosure comprises a block is a stereochemistry block. In some embodiments, a block is an Rp block in that each internucleotidic linkage of the block is Rp. In some embodiments, a 5′-block is an Rp block. In some embodiments, a 3′-block is an Rp block. In some embodiments, a block is an Sp block in that each internucleotidic linkage of the block is Sp. In some embodiments, a 5′-block is an Sp block. In some embodiments, a 3′-block is an Sp block. In some embodiments, provided oligonucleotides comprise both Rp and Sp blocks. In some embodiments, provided oligonucleotides comprise one or more Rp but no Sp blocks. In some embodiments, provided oligonucleotides comprise one or more Sp but no Rp blocks. In some embodiments, provided oligonucleotides comprise one or more PO blocks wherein each internucleotidic linkage in a natural phosphate linkage.

[0479] In some embodiments, compound of the disclosure comprises a 5′-block is an Sp block wherein each sugar moiety comprises a 2′-F modification. In some embodiments, a 5′-block is an Sp block wherein each of internucleotidic linkage is a modified internucleotidic linkage and each sugar moiety comprises a 2′-F modification. In some embodiments, a 5′-block is an Sp block wherein each of internucleotidic linkage is a phosphorothioate linkage and each sugar moiety comprises a 2′-F modification. In some embodiments, a 5′-block comprises 4 or more nucleoside units. In some embodiments, a 5′-block comprises 5 or more nucleoside units. In some embodiments, a 5′-block comprises 6 or more nucleoside units. In some embodiments, a 5′-block comprises 7 or more nucleoside units. In some embodiments, a 3′-block is an Sp block wherein each sugar moiety comprises a 2′-F modification. In some embodiments, a 3′-block is an Sp block wherein each of internucleotidic linkage is a modified internucleotidic linkage and each sugar moiety comprises a 2′-F modification. In some embodiments, a 3′-block is an Sp block wherein each of internucleotidic linkage is a phosphorothioate linkage and each sugar moiety comprises a 2′-F modification. In some embodiments, a 3′-block comprises 4 or more nucleoside units. In some embodiments, a 3′-block comprises 5 or more nucleoside units. In some embodiments, a 3′-block comprises 6 or more nucleoside units. In some embodiments, a 3′-block comprises 7 or more nucleoside units.

[0480] In some embodiments, compound of the disclosure comprises a type of nucleoside in a region or an oligonucleotide is followed by a specific type of internucleotidic linkage, e.g., natural phosphate linkage, modified internucleotidic linkage, Rp chiral internucleotidic linkage, Sp chiral internucleotidic linkage, etc. In some embodiments, A is followed by Sp. In some embodiments, A is followed by Rp. In some embodiments, A is followed by natural phosphate linkage (PO). In some embodiments, U is followed by Sp. In some embodiments, U is followed by Rp. In some embodiments, U is followed by natural phosphate linkage (PO). In some embodiments, C is followed by Sp. In some embodiments, C is followed by Rp. In some embodiments, C is followed by natural phosphate linkage (PO). In some embodiments, G is followed by Sp. In some embodiments, G is followed by Rp. In some embodiments, G is followed by natural phosphate linkage (PO). In some embodiments, C and U are followed by Sp. In some embodiments, C and U are followed by Rp. In some embodiments, C and U are followed by natural phosphate linkage (PO). In some embodiments, A and G are followed by Sp. In some embodiments, A and G are followed by Rp.

[0481] In some embodiments, the antisense strand comprises phosphorothioate intemucleotide linkages between nucleotide positions 21 and 22, and between nucleotide positions 22 and 23, wherein the antisense strand contains at least one thermally destabilizing modification of the duplex located in the seed region of the antisense strand (i.e., at position 2-9 of the 5′-end of the antisense strand), and wherein the dsRNA optionally further has at least one (e.g., one, two, three, four, five, six, seven or all eight) of the following characteristics: (i) the antisense comprises 2, 3, 4, 5 or 6 2′-fluoro modifications; (ii) the antisense comprises 3, 4 or 5 phosphorothioate internucleotide linkages; (iii) the sense strand is conjugated with a ligand; (iv) the sense strand comprises 2, 3, 4 or 5 2′-fluoro modifications; (v) the sense strand comprises 1, 2, 3, 4 or 5 phosphorothioate internucleotide linkages; (vi) the dsRNA comprises at least four 2′-fluoro modifications; (vii) the dsRNA comprises a duplex region of 12-40 nucleotide pairs in length; and (viii) the dsRNA has a blunt end at 5′-end of the antisense strand.

[0482] In some embodiments, the antisense strand comprises phosphorothioate internucleotide linkages between nucleotide positions 1 and 2, between nucleotide positions 2 and 3, between nucleotide positions 21 and 22, and between nucleotide positions 22 and 23, wherein the antisense strand contains at least one thermally destabilizing modification of the duplex located in the seed region of the antisense strand (i.e., at position 2-9 of the 5′-end of the antisense strand), and wherein the dsRNA optionally further has at least one (e.g., one, two, three, four, five, six, seven or all eight) of the following characteristics: (i) the antisense comprises 2, 3, 4, 5 or 6 2′-fluoro modifications; (ii) the sense strand is conjugated with a ligand; (iii) the sense strand comprises 2, 3, 4 or 5 2′-fluoro modifications; (iv) the sense strand comprises 1, 2, 3, 4 or 5 phosphorothioate internucleotide linkages; (v) the dsRNA comprises at least four 2′-fluoro modifications; (vi) the dsRNA comprises a duplex region of 12-40 nucleotide pairs in length; (vii) the dsRNA comprises a duplex region of 12-40 nucleotide pairs in length; and (viii) the dsRNA has a blunt end at 5′-end of the antisense strand.

[0483] In some embodiments, the sense strand comprises phosphorothioate internucleotide linkages between nucleotide positions 1 and 2, and between nucleotide positions 2 and 3, wherein the antisense strand contains at least one thermally destabilizing modification of the duplex located in the seed region of the antisense strand (i.e., at position 2-9 of the 5′-end of the antisense strand), and wherein the dsRNA optionally further has at least one (e.g., one, two, three, four, five, six, seven or all eight) of the following characteristics: (i) the antisense comprises 2, 3, 4, 5 or 6 2′-fluoro modifications; (ii) the antisense comprises 1, 2, 3, 4 or 5 phosphorothioate internucleotide linkages; (iii) the sense strand is conjugated with a ligand; (iv) the sense strand comprises 2, 3, 4 or 5 2′-fluoro modifications; (v) the sense strand comprises 3, 4 or 5 phosphorothioate internucleotide linkages; (vi) the dsRNA comprises at least four 2′-fluoro modifications; (vii) the dsRNA comprises a duplex region of 12-40 nucleotide pairs in length; and (viii) the dsRNA has a blunt end at 5′-end of the antisense strand.

[0484] In some embodiments, the sense strand comprises phosphorothioate internucleotide linkages between nucleotide positions 1 and 2, and between nucleotide positions 2 and 3, the antisense strand comprises phosphorothioate internucleotide linkages between nucleotide positions 1 and 2, between nucleotide positions 2 and 3, between nucleotide positions 21 and 22, and between nucleotide positions 22 and 23, wherein the antisense strand contains at least one thermally destabilizing modification of the duplex located in the seed region of the antisense strand (i.e., at position 2-9 of the 5′-end of the antisense strand), and wherein the dsRNA optionally further has at least one (e.g., one, two, three, four, five, six or all seven) of the following characteristics: (i) the antisense comprises 2, 3, 4, 5 or 6 2′-fluoro modifications; (ii) the sense strand is conjugated with a ligand; (iii) the sense strand comprises 2, 3, 4 or 5 2′-fluoro modifications; (iv) the sense strand comprises 3, 4 or 5 phosphorothioate internucleotide linkages; (v) the dsRNA comprises at least four 2′-fluoro modifications; (vi) the dsRNA comprises a duplex region of 12-40 nucleotide pairs in length; and (vii) the dsRNA has a blunt end at 5′-end of the antisense strand.

[0485] In some embodiments, the dsRNA molecule of the disclosure comprises mismatch(es) with the target, within the duplex, or combinations thereof. The mismatch can occur in the overhang region or the duplex region. The base pair can be ranked on the basis of their propensity to promote dissociation or melting (e.g., on the free energy of association or dissociation of a particular pairing, the simplest approach is to examine the pairs on an individual pair basis, though next neighbor or similar analysis can also be used). In terms of promoting dissociation: A:U is preferred over G:C; G:U is preferred over G:C; and I:C is preferred over G:C (I=inosine). Mismatches, e.g., non-canonical or other than canonical pairings (as described elsewhere herein) are preferred over canonical (A:T, A:U, G:C) pairings; and pairings which include a universal base are preferred over canonical pairings.

[0486] In some embodiments, the dsRNA molecule of the disclosure comprises at least one of the first 1, 2, 3, 4, or 5 base pairs within the duplex regions from the 5′-end of the antisense strand can be chosen independently from the group of: A:U, G:U, I:C, and mismatched pairs, e.g., non-canonical or other than canonical pairings or pairings which include a universal base, to promote the dissociation of the antisense strand at the 5′-end of the duplex.

[0487] In some embodiments, the nucleotide at the 1 position within the duplex region from the 5′-end in the antisense strand is selected from the group consisting of A, dA, dU, U, and dT. Alternatively, at least one of the first 1, 2 or 3 base pair within the duplex region from the 5′-end of the antisense strand is an AU base pair. For example, the first base pair within the duplex region from the 5′-end of the antisense strand is an AU base pair.

[0488] It was found that introducing 4′-modified or 5′-modified nucleotide to the 3′-end of a phosphodiester (PO), phosphorothioate (PS), or phosphorodithioate (PS2) linkage of a dinucleotide at any position of single stranded or double stranded oligonucleotide can exert steric effect to the internucleotide linkage and, hence, protecting or stabilizing it against nucleases. In some embodiments, the introduction of a 4′-modified or a 5′-modified nucleotide to the 3′-end of a PO, PS, or PS2 linkage of a dinucleotide modifies the second nucleotide in the dinucleotide pair. In other embodiments, the introduction of a 4′-modified or a 5′-modified nucleotide to the 3′-end of a PO, PS, or PS2 linkage of a dinucleotide modifies the nucleotide at the 3′-end of the dinucleotide pair.

[0489] In some embodiments, 5′-modified nucleotide is introduced at the 3′-end of a dinucleotide at any position of single stranded or double stranded siRNA. For instance, a 5′-alkylated nucleoside may be introduced at the 3′-end of a dinucleotide at any position of single stranded or double stranded siRNA. The alkyl group at the 5′ position of the ribose sugar can be racemic or chirally pure R or S isomer. An exemplary 5′-alkylated nucleotide is 5′-methyl nucleoside. The 5′-methyl can be either racemic or chirally pure R or S isomer.

[0490] In some embodiments, 4′-modified nucleotide is introduced at the 3′-end of a dinucleotide at any position of single stranded or double stranded siRNA. For instance, a 4′-alkylated nucleoside may be introduced at the 3′-end of a dinucleotide at any position of single stranded or double stranded siRNA. The alkyl group at the 4′ position of the ribose sugar can be racemic or chirally pure R or S isomer. An exemplary 4′-alkylated nucleotide is 4′-methyl nucleoside. The 4′-methyl can be either racemic or chirally pure R or S isomer. Alternatively, a 4′-O-alkylated nucleoside may be introduced at the 3′-end of a dinucleotide at any position of single stranded or double stranded siRNA. The 4′-O-alkyl of the ribose sugar can be racemic or chirally pure R or S isomer. An exemplary 4′-O-alkylated nucleotide is 4′-O-methyl nucleoside. The 4′-O-methyl can be either racemic or chirally pure R or S isomer.

[0491] In some embodiments, 5′-alkylated nucleotide is introduced at any position on the sense strand or antisense strand of a dsRNA, and such modification maintains or improves potency of the dsRNA. The 5′-alkyl can be either racemic or chirally pure R or S isomer. An exemplary 5′-alkylated nucleotide is 5′-methyl nucleoside. The 5′-methyl can be either racemic or chirally pure R or S isomer.

[0492] In some embodiments, 4′-alkylated nucleotide is introduced at any position on the sense strand or antisense strand of a dsRNA, and such modification maintains or improves potency of the dsRNA. The 4′-alkyl can be either racemic or chirally pure R or S isomer. An exemplary 4′-alkylated nucleotide is 4′-methyl nucleoside. The 4′-methyl can be either racemic or chirally pure R or S isomer.

[0493] In some embodiments, 4′-O-alkylated nucleotide is introduced at any position on the sense strand or antisense strand of a dsRNA, and such modification maintains or improves potency of the dsRNA. The 5′-alkyl can be either racemic or chirally pure R or S isomer. An exemplary 4′-O-alkylated nucleotide is 4′-O-methyl nucleoside. The 4′-O-methyl can be either racemic or chirally pure R or S isomer.

[0494] In some embodiments, the dsRNA molecule of the disclosure can comprise 2′-5′ linkages (with 2′-H, 2′-OH and 2′-OMe and with P=0 or P═S). For example, the 2′-5′ linkages modifications can be used to promote nuclease resistance or to inhibit binding of the sense to the antisense strand, or can be used at the 5′ end of the sense strand to avoid sense strand activation by RISC.

[0495] In another embodiment, the dsRNA molecule of the disclosure can comprise L sugars (e.g., L ribose, L-arabinose with 2′-H, 2′-OH and 2′-OMe). For example, these L sugars modifications can be used to promote nuclease resistance or to inhibit binding of the sense to the antisense strand, or can be used at the 5′ end of the sense strand to avoid sense strand activation by RISC.

[0496] Various publications describe multimeric siRNA which can all be used with the dsRNA of the disclosure. Such publications include WO2007/091269, U.S. Pat. No. 7,858,769, WO2010/141511, WO2007/117686, WO2009/014887, and WO2011/031520 which are hereby incorporated by their entirely.

[0497] As described in more detail below, the RNAi agent that contains conjugations of one or more carbohydrate moieties to an RNAi agent can optimize one or more properties of the RNAi agent. In many cases, the carbohydrate moiety will be attached to a modified subunit of the RNAi agent. For example, the ribose sugar of one or more ribonucleotide subunits of a dsRNA agent can be replaced with another moiety, e.g., a non-carbohydrate (preferably cyclic) carrier to which is attached a carbohydrate ligand. A ribonucleotide subunit in which the ribose sugar of the subunit has been so replaced is referred to herein as a ribose replacement modification subunit (RRMS). A cyclic carrier may be a carbocyclic ring system, i.e., all ring atoms are carbon atoms, or a heterocyclic ring system, i.e., one or more ring atoms may be a heteroatom, e.g., nitrogen, oxygen, sulfur. The cyclic carrier may be a monocyclic ring system, or may contain two or more rings, e.g. fused rings. The cyclic carrier may be a fully saturated ring system, or it may contain one or more double bonds.

[0498] The ligand may be attached to the polynucleotide via a carrier. The carriers include (i) at least one “backbone attachment point,” preferably two “backbone attachment points” and (ii) at least one “tethering attachment point.” A “backbone attachment point” as used herein refers to a functional group, e.g. a hydroxyl group, or generally, a bond available for, and that is suitable for incorporation of the carrier into the backbone, e.g., the phosphate, or modified phosphate, e.g., sulfur containing, backbone, of a ribonucleic acid. A “tethering attachment point” (TAP) in some embodiments refers to a constituent ring atom of the cyclic carrier, e.g., a carbon atom or a heteroatom (distinct from an atom which provides a backbone attachment point), that connects a selected moiety. The moiety can be, e.g., a carbohydrate, e.g. monosaccharide, disaccharide, trisaccharide, tetrasaccharide, oligosaccharide and polysaccharide.

[0499] Optionally, the selected moiety is connected by an intervening tether to the cyclic carrier. Thus, the cyclic carrier will often include a functional group, e.g., an amino group, or generally, provide a bond, that is suitable for incorporation or tethering of another chemical entity, e.g., a ligand to the constituent ring.

[0500] The RNAi agents may be conjugated to a ligand via a carrier, wherein the carrier can be cyclic group or acyclic group; preferably, the cyclic group is selected from pyrrolidinyl, pyrazolinyl, pyrazolidinyl, imidazolinyl, imidazolidinyl, piperidinyl, piperazinyl, [1,3]dioxolane, oxazolidinyl, isoxazolidinyl, morpholinyl, thiazolidinyl, isothiazolidinyl, quinoxalinyl, pyridazinonyl, tetrahydrofuryl and and decalin; preferably, the acyclic group is selected from serinol backbone or diethanolamine backbone.

[0501] In certain specific embodiments, the RNAi agent for use in the methods of the disclosure is an agent selected from the group of agents listed in any one of Tables 2-5, 7, or 8. These agents may further comprise a ligand.

### IV. iRNAs Conjugated to Ligands

[0502] Another modification of the RNA of an iRNA of the disclosure involves chemically linking to the iRNA one or more ligands, moieties or conjugates that enhance the activity, cellular distribution or cellular uptake of the iRNA, e.g., into a cell. Such moieties include but are not limited to lipid moieties such as a cholesterol moiety (Letsinger et al., Proc. Natl. Acid. Sci. USA, 1989, 86: 6553-6556), cholic acid (Manoharan et al., Biorg. Med. Chem. Let., 1994, 4:1053-1060), a thioether, e.g., beryl-S-tritylthiol (Manoharan et al., Ann. N.Y. Acad. Sci., 1992, 660:306-309; Manoharan et al., Biorg. Med. Chem. Let., 1993, 3:2765-2770), a thiocholesterol (Oberhauser et al., Nucl. Acids Res., 1992, 20:533-538), an aliphatic chain, e.g., dodecandiol or undecyl residues (Saison-Behmoaras et al., EMBO J, 1991, 10:1111-1118; Kabanov et al., FEBS Lett., 1990, 259:327-330; Svinarchuk et al., Biochimie, 1993, 75:49-54), a phospholipid, e.g., di-hexadecyl-rac-glycerol or triethyl-ammonium 1,2-di-O-hexadecyl-rac-glycero-3-phosphonate (Manoharan et al., Tetrahedron Lett., 1995, 36:3651-3654; Shea et al., Nucl. Acids Res., 1990, 18:3777-3783), a polyamine or a polyethylene glycol chain (Manoharan et al., Nucleosides & Nucleotides, 1995, 14:969-973), or adamantane acetic acid (Manoharan et al., Tetrahedron Lett., 1995, 36:3651-3654), a palmityl moiety (Mishra et al., Biochim. Biophys. Acta, 1995, 1264:229-237), or an octadecylamine or hexylamino-carbonyloxycholesterol moiety (Crooke et al., J. Pharmacol. Exp. Ther., 1996, 277:923-937).

[0503] In certain embodiments, a ligand alters the distribution, targeting or lifetime of an iRNA agent into which it is incorporated. In some embodiments, a ligand provides an enhanced affinity for a selected target, e.g., molecule, cell or cell type, compartment, e.g., a cellular or organ compartment, tissue, organ or region of the body, as, e.g., compared to a species absent such a ligand. Typical ligands will not take part in duplex pairing in a duplexed nucleic acid.

[0504] Ligands can include a naturally occurring substance, such as a protein (e.g., human serum albumin (HSA), low-density lipoprotein (LDL), or globulin); carbohydrate (e.g., a dextran, pullulan, chitin, chitosan, inulin, cyclodextrin or hyaluronic acid); or a lipid. The ligand may also be a recombinant or synthetic molecule, such as a synthetic polymer, e.g., a synthetic polyamino acid. Examples of polyamino acids include polyamino acid is a polylysine (PLL), poly L-aspartic acid, poly L-glutamic acid, styrene-maleic acid anhydride copolymer, poly(L-lactide-co-glycolied) copolymer, divinyl ether-maleic anhydride copolymer, N-(2-hydroxypropyl) methacrylamide copolymer (HMPA), polyethylene glycol (PEG), polyvinyl alcohol (PVA), polyurethane, poly (2-ethylacryllic acid), N-isopropylacrylamide polymers, or polyphosphazine. Example of polyamines include: polyethylenimine, polylysine (PLL), spermine, spermidine, polyamine, pseudopeptide-polyamine, peptidomimetic polyamine, dendrimer polyamine, arginine, amidine, protamine, cationic lipid, cationic porphyrin, quaternary salt of a polyamine, or an α helical peptide.

[0505] Ligands can also include targeting groups, e.g., a cell or tissue targeting agent, e.g., a lectin, glycoprotein, lipid or protein, e.g., an antibody, that binds to a specified cell type such as a kidney cell. A targeting group can be a thyrotropin, melanotropin, lectin, glycoprotein, surfactant protein A, Mucin carbohydrate, multivalent lactose, multivalent galactose, N-acetyl-galactosamine, N-acetyl-glucosamine multivalent mannose, multivalent fucose, glycosylated polyaminoacids, multivalent galactose, transferrin, bisphosphonate, polyglutamate, polyaspartate, a lipid, cholesterol, a steroid, bile acid, folate, vitamin B12, biotin, or an RGD peptide or RGD peptide mimetic. In certain embodiments, the ligand is a multivalent galactose, e.g., an N-acetyl-galactosamine.

[0506] Other examples of ligands include dyes, intercalating agents (e.g. acridines), cross-linkers (e.g. psoralene, mitomycin C), porphyrins (TPPC4, texaphyrin, Sapphyrin), polycyclic aromatic hydrocarbons (e.g., phenazine, dihydrophenazine), artificial endonucleases (e.g. EDTA), lipophilic molecules, e.g., cholesterol, cholic acid, adamantane acetic acid, 1-pyrene butyric acid, dihydrotestosterone, 1,3-Bis-O(hexadecyl)glycerol, geranyloxyhexyl group, hexadecylglycerol, borneol, menthol, 1,3-propanediol, heptadecyl group, palmitic acid, myristic acid, O3-(oleoyl)lithocholic acid, O3-(oleoyl)cholenic acid, dimethoxytrityl, or phenoxazine)and peptide conjugates (e.g., antennapedia peptide, Tat peptide), alkylating agents, phosphate, amino, mercapto, PEG (e.g., PEG-40K), MPEG, [MPEG]₂, polyamino, alkyl, substituted alkyl, radiolabeled markers, enzymes, haptens (e.g. biotin), transport/absorption facilitators (e.g., aspirin, vitamin E, folic acid), synthetic ribonucleases (e.g., imidazole, bisimidazole, histamine, imidazole clusters, acridine-imidazole conjugates, Eu3+ complexes of tetraazamacrocycles), dinitrophenyl, HRP, or AP.

[0507] Ligands can be proteins, e.g., glycoproteins, or peptides, e.g., molecules having a specific affinity for a co-ligand, or antibodies e.g., an antibody, that binds to a specified cell type such as a cancer cell, endothelial cell, or bone cell. Ligands may also include hormones and hormone receptors. They can also include non-peptidic species, such as lipids, lectins, carbohydrates, vitamins, cofactors, multivalent lactose, multivalent galactose, N-acetyl-galactosamine, N-acetyl-glucosamine multivalent mannose, or multivalent fucose. The ligand can be, for example, a lipopolysaccharide, an activator of p38 MAP kinase, or an activator of NF-κB.

[0508] The ligand can be a substance, e.g., a drug, which can increase the uptake of the iRNA agent into the cell, for example, by disrupting the cell's cytoskeleton, e.g., by disrupting the cell's microtubules, microfilaments, or intermediate filaments. The drug can be, for example, taxon, vincristine, vinblastine, cytochalasin, nocodazole, japlakinolide, latrunculin A, phalloidin, swinholide A, indanocine, or myoservin.

[0509] In some embodiments, a ligand attached to an iRNA as described herein acts as a pharmacokinetic modulator (PK modulator). PK modulators include lipophiles, bile acids, steroids, phospholipid analogues, peptides, protein binding agents, PEG, vitamins etc. Exemplary PK modulators include, but are not limited to, cholesterol, fatty acids, cholic acid, lithocholic acid, dialkylglycerides, diacylglyceride, phospholipids, sphingolipids, naproxen, ibuprofen, vitamin E, biotin etc. Oligonucleotides that comprise a number of phosphorothioate linkages are also known to bind to serum protein, thus short oligonucleotides, e.g., oligonucleotides of about 5 bases, 10 bases, 15 bases or 20 bases, comprising multiple of phosphorothioate linkages in the backbone are also amenable to the present disclosure as ligands (e.g. as PK modulating ligands). In addition, aptamers that bind serum components (e.g. serum proteins) are also suitable for use as PK modulating ligands in the embodiments described herein.

[0510] Ligand-conjugated iRNAs of the disclosure may be synthesized by the use of an oligonucleotide that bears a pendant reactive functionality, such as that derived from the attachment of a linking molecule onto the oligonucleotide (described below). This reactive oligonucleotide may be reacted directly with commercially-available ligands, ligands that are synthesized bearing any of a variety of protecting groups, or ligands that have a linking moiety attached thereto.

[0511] The oligonucleotides used in the conjugates of the present disclosure may be conveniently and routinely made through the well-known technique of solid-phase synthesis. Equipment for such synthesis is sold by several vendors including, for example, Applied Biosystems® (Foster City, Calif). Any other means for such synthesis known in the art may additionally or alternatively be employed. It is also known to use similar techniques to prepare other oligonucleotides, such as the phosphorothioates and alkylated derivatives.

[0512] In the ligand-conjugated oligonucleotides and ligand-molecule bearing sequence-specific linked nucleosides of the present disclosure, the oligonucleotides and oligonucleosides may be assembled on a suitable DNA synthesizer utilizing standard nucleotide or nucleoside precursors, or nucleotide or nucleoside conjugate precursors that already bear the linking moiety, ligand-nucleotide or nucleoside-conjugate precursors that already bear the ligand molecule, or non-nucleoside ligand-bearing building blocks.

[0513] When using nucleotide-conjugate precursors that already bear a linking moiety, the synthesis of the sequence-specific linked nucleosides is typically completed, and the ligand molecule is then reacted with the linking moiety to form the ligand-conjugated oligonucleotide. In some embodiments, the oligonucleotides or linked nucleosides of the present disclosure are synthesized by an automated synthesizer using phosphoramidites derived from ligand-nucleoside conjugates in addition to the standard phosphoramidites and non-standard phosphoramidites that are commercially available and routinely used in oligonucleotide synthesis.

### A. Lipid Conjugates

[0514] In certain embodiments, the ligand or conjugate is a lipid or lipid-based molecule. Such a lipid or lipid-based molecule can typically bind a serum protein, such as human serum albumin (HSA). An HSA binding ligand allows for distribution of the conjugate to a target tissue, e.g., a non-kidney target tissue of the body. For example, the target tissue can be the liver, including parenchymal cells of the liver. Other molecules that can bind HSA can also be used as ligands. For example, naproxen or aspirin can be used. A lipid or lipid-based ligand can (a) increase resistance to degradation of the conjugate, (b) increase targeting or transport into a target cell or cell membrane, or (c) can be used to adjust binding to a serum protein, e.g., HSA.

[0515] A lipid-based ligand can be used to modulate, e.g., control (e.g., inhibit) the binding of the conjugate to a target tissue. For example, a lipid or lipid-based ligand that binds to HSA more strongly will be less likely to be targeted to the kidney and therefore less likely to be cleared from the body. A lipid or lipid-based ligand that binds to HSA less strongly can be used to target the conjugate to the kidney.

[0516] In certain embodiments, the lipid-based ligand binds HSA. For example, the ligand can bind HSA with a sufficient affinity such that distribution of the conjugate to a non-kidney tissue is enhanced. However, the affinity is typically not so strong that the HSA-ligand binding cannot be reversed.

[0517] In certain embodiments, the lipid-based ligand binds HSA weakly or not at all, such that distribution of the conjugate to the kidney is enhanced. Other moieties that target to kidney cells can also be used in place of or in addition to the lipid-based ligand.

[0518] In another aspect, the ligand is a moiety, e.g., a vitamin, which is taken up by a target cell, e.g., a proliferating cell. These are particularly useful for treating disorders characterized by unwanted cell proliferation, e.g., of the malignant or non-malignant type, e.g., cancer cells. Exemplary vitamins include vitamin A, E, and K. Other exemplary vitamins include are B vitamin, e.g., folic acid, B12, riboflavin, biotin, pyridoxal or other vitamins or nutrients taken up by cancer cells. Also included are HSA and low density lipoprotein (LDL).

### B. Cell Permeation Agents

[0519] In another aspect, the ligand is a cell-permeation agent, such as a helical cell-permeation agent. In certain embodiments, the agent is amphipathic. An exemplary agent is a peptide such as tat or antennopedia. If the agent is a peptide, it can be modified, including a peptidylmimetic, invertomers, non-peptide or pseudo-peptide linkages, and use of D-amino acids. The helical agent is typically an α-helical agent and can have a lipophilic and a lipophobic phase.

[0520] The ligand can be a peptide or peptidomimetic. A peptidomimetic (also referred to herein as an oligopeptidomimetic) is a molecule capable of folding into a defined three-dimensional structure similar to a natural peptide. The attachment of peptide and peptidomimetics to iRNA agents can affect pharmacokinetic distribution of the iRNA, such as by enhancing cellular recognition and absorption. The peptide or peptidomimetic moiety can be about 5-50 amino acids long, e.g., about 5, 10, 15, 20, 25, 30, 35, 40, 45, or 50 amino acids long.

[0521] A peptide or peptidomimetic can be, for example, a cell permeation peptide, cationic peptide, amphipathic peptide, or hydrophobic peptide (e.g., consisting primarily of Tyr, Trp, or Phe). The peptide moiety can be a dendrimer peptide, constrained peptide or crosslinked peptide. In another alternative, the peptide moiety can include a hydrophobic membrane translocation sequence (MTS). An exemplary hydrophobic MTS-containing peptide is RFGF having the amino acid sequence AAVALLPAVLLALLAP (SEQ ID NO: 14. An RFGF analogue (e.g., amino acid sequence AALLPVLLAAP (SEQ ID NO: 15)) containing a hydrophobic MTS can also be a targeting moiety. The peptide moiety can be a “delivery” peptide, which can carry large polar molecules including peptides, oligonucleotides, and protein across cell membranes. For example, sequences from the HIV Tat protein (GRKKRRQRRRPPQ (SEQ ID NO: 16)) and the Drosophila Antennapedia protein (RQIKIWFQNRRMKWKK (SEQ ID NO: 17)) have been found to be capable of functioning as delivery peptides. A peptide or peptidomimetic can be encoded by a random sequence of DNA, such as a peptide identified from a phage-display library, or one-bead-one-compound (OBOC) combinatorial library (Lam et al., Nature, 354:82-84, 1991). Typically, the peptide or peptidomimetic tethered to a dsRNA agent via an incorporated monomer unit is a cell targeting peptide such as an arginine-glycine-aspartic acid (RGD)-peptide, or RGD mimic. A peptide moiety can range in length from about 5 amino acids to about 40 amino acids. The peptide moieties can have a structural modification, such as to increase stability or direct conformational properties. Any of the structural modifications described below can be utilized.

[0522] An RGD peptide for use in the compositions and methods of the disclosure may be linear or cyclic, and may be modified, e.g., glycosylated or methylated, to facilitate targeting to a specific tissue(s). RGD-containing peptides and peptidiomimemtics may include D-amino acids, as well as synthetic RGD mimics. In addition to RGD, one can use other moieties that target the integrin ligand. Preferred conjugates of this ligand target PECAM-1 or VEGF.

[0523] An RGD peptide moiety can be used to target a particular cell type, e.g., a tumor cell, such as an endothelial tumor cell or a breast cancer tumor cell (Zitzmann et al., Cancer Res., 62:5139-43, 2002). An RGD peptide can facilitate targeting of an dsRNA agent to tumors of a variety of other tissues, including the lung, kidney, spleen, or liver (Aoki et al., Cancer Gene Therapy 8:783-787, 2001). Typically, the RGD peptide will facilitate targeting of an iRNA agent to the kidney. The RGD peptide can be linear or cyclic, and can be modified, e.g., glycosylated or methylated to facilitate targeting to specific tissues. For example, a glycosylated RGD peptide can deliver an iRNA agent to a tumor cell expressing avB3 (Haubner et al., Jour. Nucl. Med., 42:326-336, 2001).

[0524] A “cell permeation peptide” is capable of permeating a cell, e.g., a microbial cell, such as a bacterial or fungal cell, or a mammalian cell, such as a human cell. A microbial cell-permeating peptide can be, for example, an α-helical linear peptide (e.g., LL-37 or Ceropin P1), a disulfide bond-containing peptide (e.g., α-defensin, β-defensin or bactenecin), or a peptide containing only one or two dominating amino acids (e.g., PR-39 or indolicidin). A cell permeation peptide can also include a nuclear localization signal (NLS). For example, a cell permeation peptide can be a bipartite amphipathic peptide, such as MPG, which is derived from the fusion peptide domain of HIV-1 gp41 and the NLS of SV40 large T antigen (Simeoni et al., Nucl. Acids Res. 31:2717-2724, 2003).

### C. Carbohydrate Conjugates

[0525] In some embodiments of the compositions and methods of the disclosure, an iRNA further comprises a carbohydrate. The carbohydrate conjugated iRNA are advantageous for the in vivo delivery of nucleic acids, as well as compositions suitable for in vivo therapeutic use, as described herein. As used herein, “carbohydrate” refers to a compound which is either a carbohydrate per se made up of one or more monosaccharide units having at least 6 carbon atoms (which can be linear, branched or cyclic) with an oxygen, nitrogen or sulfur atom bonded to each carbon atom; or a compound having as a part thereof a carbohydrate moiety made up of one or more monosaccharide units each having at least six carbon atoms (which can be linear, branched or cyclic), with an oxygen, nitrogen or sulfur atom bonded to each carbon atom. Representative carbohydrates include the sugars (mono-, di-, tri- and oligosaccharides containing from about 4, 5, 6, 7, 8, or 9 monosaccharide units), and polysaccharides such as starches, glycogen, cellulose and polysaccharide gums. Specific monosaccharides include C5 and above (e.g., C5, C6, C7, or C8) sugars; di- and tri-saccharides include sugars having two or three monosaccharide units (e.g., C5, C6, C7, or C8).

[0526] In certain embodiments, a carbohydrate conjugate comprises a monosaccharide.

[0527] In certain embodiments, the monosaccharide is an N-acetylgalactosamine (GalNAc). GalNAc conjugates, which comprise one or more N-acetylgalactosamine (GalNAc) derivatives, are described, for example, in U.S. Pat. No. 8,106,022, the entire content of which is hereby incorporated herein by reference. In some embodiments, the GalNAc conjugate serves as a ligand that targets the iRNA to particular cells. In some embodiments, the GalNAc conjugate targets the iRNA to liver cells, e.g., by serving as a ligand for the asialoglycoprotein receptor of liver cells (e.g., hepatocytes).

[0528] In some embodiments, the carbohydrate conjugate comprises one or more GalNAc derivatives. The GalNAc derivatives may be attached via a linker, e.g., a bivalent or trivalent branched linker. In some embodiments the GalNAc conjugate is conjugated to the 3′ end of the sense strand. In some embodiments, the GalNAc conjugate is conjugated to the iRNA agent (e.g., to the 3′ end of the sense strand) via a linker, e.g., a linker as described herein. In some embodiments the GalNAc conjugate is conjugated to the 5′ end of the sense strand. In some embodiments, the GalNAc conjugate is conjugated to the iRNA agent (e.g., to the 5′ end of the sense strand) via a linker, e.g., a linker as described herein.

[0529] In certain embodiments of the disclosure, the GalNAc or GalNAc derivative is attached to an iRNA agent of the disclosure via a monovalent linker. In some embodiments, the GalNAc or GalNAc derivative is attached to an iRNA agent of the disclosure via a bivalent linker. In yet other embodiments of the disclosure, the GalNAc or GalNAc derivative is attached to an iRNA agent of the disclosure via a trivalent linker. In other embodiments of the disclosure, the GalNAc or GalNAc derivative is attached to an iRNA agent of the disclosure via a tetravalent linker.

[0530] In certain embodiments, the double stranded RNAi agents of the disclosure comprise one GalNAc or GalNAc derivative attached to the iRNA agent. In certain embodiments, the double stranded RNAi agents of the disclosure comprise a plurality (e.g., 2, 3, 4, 5, or 6) GalNAc or GalNAc derivatives, each independently attached to a plurality of nucleotides of the double stranded RNAi agent through a plurality of monovalent linkers.

[0531] In some embodiments, for example, when the two strands of an iRNA agent of the disclosure are part of one larger molecule connected by an uninterrupted chain of nucleotides between the 3′-end of one strand and the 5′-end of the respective other strand forming a hairpin loop comprising, a plurality of unpaired nucleotides, each unpaired nucleotide within the hairpin loop may independently comprise a GalNAc or GalNAc derivative attached via a monovalent linker. The hairpin loop may also be formed by an extended overhang in one strand of the duplex.

[0532] In some embodiments, for example, when the two strands of an iRNA agent of the disclosure are part of one larger molecule connected by an uninterrupted chain of nucleotides between the 3′-end of one strand and the 5′-end of the respective other strand forming a hairpin loop comprising, a plurality of unpaired nucleotides, each unpaired nucleotide within the hairpin loop may independently comprise a GalNAc or GalNAc derivative attached via a monovalent linker. The hairpin loop may also be formed by an extended overhang in one strand of the duplex.

[0533] In some embodiments, the GalNAc conjugate is

[chemical structure]

[0534] In some embodiments, the RNAi agent is attached to the carbohydrate conjugate via a linker as shown in the following schematic, wherein X is O or S

[chemical structure]

[0535] In some embodiments, the RNAi agent is conjugated to L96 as defined in Table 2 and shown below:

[chemical structure]

[0536] In certain embodiments, a carbohydrate conjugate or use in the compositions and methods o the disclosure is selected from the group consisting of:

[chemical structure]

[chemical structure]

[chemical structure]

[chemical structure]

[chemical structure]

wherein Y is O or S and n is 3-6 (Formula XXIV);

[chemical structure]

wherein Y is O or S and n is 3-6 (Formula XXV);

[chemical structure]

wherein X is O or S (Formula XXVII);

[chemical structure]

[chemical structure]

[chemical structure]

[0537] In certain embodiments, a carbohydrate conjugate for use in the compositions and methods of the disclosure is a monosaccharide. In certain embodiments, the monosaccharide is an N-acetylgalactosamine, such as

[chemical structure]

[0538] Another representative carbohydrate conjugate for use in the embodiments described herein includes but is not limited to

[chemical structure]

[0539] when one of X or Y is an oligonucleotide, the other is a hydrogen.

[0540] In some embodiments, a suitable ligand is a ligand disclosed in WO 2019/055633, the entire contents of which are incorporated herein by reference. In one embodiment the ligand comprises the structure below.

[chemical structure]

[0541] In certain embodiments, the RNAi agents of the disclosure may include GalNAc ligands, even if such GalNAc ligands are currently projected to be of limited value for the preferred intrathecal/CNS delivery route(s) of the instant disclosure.

[0542] In certain embodiments of the disclosure, the GalNAc or GalNAc derivative is attached to an iRNA agent of the disclosure via a monovalent linker. In some embodiments, the GalNAc or GalNAc derivative is attached to an iRNA agent of the disclosure via a bivalent linker. In yet other embodiments of the disclosure, the GalNAc or GalNAc derivative is attached to an iRNA agent of the disclosure via a trivalent linker.

[0543] In one embodiment, the double stranded RNAi agents of the disclosure comprise one or more GalNAc or GalNAc derivative attached to the iRNA agent. The GalNAc may be attached to any nucleotide via a linker on the sense strand or antsisense strand. The GalNac may be attached to the 5′-end of the sense strand, the 3′ end of the sense strand, the 5′-end of the antisense strand, or the 3′-end of the antisense strand. In one embodiment, the GalNAc is attached to the 3′ end of the sense strand, e.g., via a trivalent linker.

[0544] In other embodiments, the double stranded RNAi agents of the disclosure comprise a plurality (e.g., 2, 3, 4, 5, or 6) GalNAc or GalNAc derivatives, each independently attached to a plurality of nucleotides of the double stranded RNAi agent through a plurality of linkers, e.g., monovalent linkers.

[0545] In some embodiments, for example, when the two strands of an iRNA agent of the disclosure is part of one larger molecule connected by an uninterrupted chain of nucleotides between the 3′-end of one strand and the 5′-end of the respective other strand forming a hairpin loop comprising, a plurality of unpaired nucleotides, each unpaired nucleotide within the hairpin loop may independently comprise a GalNAc or GalNAc derivative attached via a monovalent linker.

[0546] In some embodiments, the carbohydrate conjugate further comprises one or more additional ligands as described above, such as, but not limited to, a PK modulator or a cell permeation peptide.

[0547] Additional carbohydrate conjugates and linkers suitable for use in the present disclosure include those described in WO 2014/179620 and WO 2014/179627, the entire contents of each of which are incorporated herein by reference.

### D. Linkers

[0548] In some embodiments, the conjugate or ligand described herein can be attached to an iRNA oligonucleotide with various linkers that can be cleavable or non-cleavable.

[0549] The term “linker” or “linking group” means an organic moiety that connects two parts of a compound, e.g., covalently attaches two parts of a compound. Linkers typically comprise a direct bond or an atom such as oxygen or sulfur, a unit such as NR8, C(O), C(O)NH, SO, SO₂, SO₂NH or a chain of atoms, such as, but not limited to, substituted or unsubstituted alkyl, substituted or unsubstituted alkenyl, substituted or unsubstituted alkynyl, arylalkyl, arylalkenyl, arylalkynyl, heteroarylalkyl, heteroarylalkenyl, heteroarylalkynyl, heterocyclylalkyl, heterocyclylalkenyl, heterocyclylalkynyl, aryl, heteroaryl, heterocyclyl, cycloalkyl, cycloalkenyl, alkylarylalkyl, alkylarylalkenyl, alkylarylalkynyl, alkenylarylalkyl, alkenylarylalkenyl, alkenylarylalkynyl, alkynylarylalkyl, alkynylarylalkenyl, alkynylarylalkynyl, alkylheteroarylalkyl, alkylheteroarylalkenyl, alkylheteroarylalkynyl, alkenylheteroarylalkyl, alkenylheteroarylalkenyl, alkenylheteroarylalkynyl, alkynylheteroarylalkyl, alkynylheteroarylalkenyl, alkynylheteroarylalkynyl, alkylheterocyclylalkyl, alkylheterocyclylalkenyl, alkylhererocyclylalkynyl, alkenylheterocyclylalkyl, alkenylheterocyclylalkenyl, alkenylheterocyclylalkynyl, alkynylheterocyclylalkyl, alkynylheterocyclylalkenyl, alkynylheterocyclylalkynyl, alkylaryl, alkenylaryl, alkynylaryl, alkylheteroaryl, alkenylheteroaryl, alkynylhereroaryl, which one or more methylenes can be interrupted or terminated by O, S, S(O), SO₂, N(R8), C(O), substituted or unsubstituted aryl, substituted or unsubstituted heteroaryl, substituted or unsubstituted heterocyclic; where R8 is hydrogen, acyl, aliphatic or substituted aliphatic. In certain embodiments, the linker is between about 1-24 atoms, 2-24, 3-24, 4-24, 5-24, 6-24, 6-18, 7-18, 8-18 atoms, 7-17, 8-17, 6-16, 7-16, or 8-16 atoms.

[0550] A cleavable linking group is one which is sufficiently stable outside the cell, but which upon entry into a target cell is cleaved to release the two parts the linker is holding together. In a preferred embodiment, the cleavable linking group is cleaved at least about 10 times, 20, times, 30 times, 40 times, 50 times, 60 times, 70 times, 80 times, 90 times or more, or at least about 100 times faster in a target cell or under a first reference condition (which can, e.g., be selected to mimic or represent intracellular conditions) than in the blood of a subject, or under a second reference condition (which can, e.g., be selected to mimic or represent conditions found in the blood or serum).

[0551] Cleavable linking groups are susceptible to cleavage agents, e.g., pH, redox potential or the presence of degradative molecules. Generally, cleavage agents are more prevalent or found at higher levels or activities inside cells than in serum or blood. Examples of such degradative agents include: redox agents which are selected for particular substrates or which have no substrate specificity, including, e.g., oxidative or reductive enzymes or reductive agents such as mercaptans, present in cells, that can degrade a redox cleavable linking group by reduction; esterases; endosomes or agents that can create an acidic environment, e.g., those that result in a pH of five or lower; enzymes that can hydrolyze or degrade an acid cleavable linking group by acting as a general acid, peptidases (which can be substrate specific), and phosphatases.

[0552] A cleavable linkage group, such as a disulfide bond can be susceptible to pH. The pH of human serum is 7.4, while the average intracellular pH is slightly lower, ranging from about 7.1-7.3. Endosomes have a more acidic pH, in the range of 5.5-6.0, and lysosomes have an even more acidic pH at around 5.0. Some linkers will have a cleavable linking group that is cleaved at a preferred pH, thereby releasing a cationic lipid from the ligand inside the cell, or into the desired compartment of the cell.

[0553] A linker can include a cleavable linking group that is cleavable by a particular enzyme. The type of cleavable linking group incorporated into a linker can depend on the cell to be targeted. For example, a liver-targeting ligand can be linked to a cationic lipid through a linker that includes an ester group. Liver cells are rich in esterases, and therefore the linker will be cleaved more efficiently in liver cells than in cell types that are not esterase-rich. Other cell-types rich in esterases include cells of the lung, renal cortex, and testis.

[0554] Linkers that contain peptide bonds can be used when targeting cell types rich in peptidases, such as liver cells and synoviocytes.

[0555] In general, the suitability of a candidate cleavable linking group can be evaluated by testing the ability of a degradative agent (or condition) to cleave the candidate linking group. It will also be desirable to also test the candidate cleavable linking group for the ability to resist cleavage in the blood or when in contact with other non-target tissue. Thus, one can determine the relative susceptibility to cleavage between a first and a second condition, where the first is selected to be indicative of cleavage in a target cell and the second is selected to be indicative of cleavage in other tissues or biological fluids, e.g., blood or serum. The evaluations can be carried out in cell free systems, in cells, in cell culture, in organ or tissue culture, or in whole animals. It can be useful to make initial evaluations in cell-free or culture conditions and to confirm by further evaluations in whole animals. In preferred embodiments, useful candidate compounds are cleaved at least about 2, 4, 10, 20, 30, 40, 50, 60, 70, 80, 90, or about 100 times faster in the cell (or under in vitro conditions selected to mimic intracellular conditions) as compared to blood or serum (or under in vitro conditions selected to mimic extracellular conditions).

i. Redox Cleavable Linking Groups

[0556] In certain embodiments, a cleavable linking group is a redox cleavable linking group that is cleaved upon reduction or oxidation. An example of reductively cleavable linking group is a disulphide linking group (—S—S—). To determine if a candidate cleavable linking group is a suitable “reductively cleavable linking group,” or for example is suitable for use with a particular iRNA moiety and particular targeting agent one can look to methods described herein. For example, a candidate can be evaluated by incubation with dithiothreitol (DTT), or other reducing agent using reagents know in the art, which mimic the rate of cleavage which would be observed in a cell, e.g., a target cell. The candidates can also be evaluated under conditions which are selected to mimic blood or serum conditions. In one, candidate compounds are cleaved by at most about 10% in the blood. In other embodiments, useful candidate compounds are degraded at least about 2, 4, 10, 20, 30, 40, 50, 60, 70, 80, 90, or about 100 times faster in the cell (or under in vitro conditions selected to mimic intracellular conditions) as compared to blood (or under in vitro conditions selected to mimic extracellular conditions). The rate of cleavage of candidate compounds can be determined using standard enzyme kinetics assays under conditions chosen to mimic intracellular media and compared to conditions chosen to mimic extracellular media.

ii. Phosphate-Based Cleavable Linking Groups

[0557] In certain embodiments, a cleavable linker comprises a phosphate-based cleavable linking group. A phosphate-based cleavable linking group is cleaved by agents that degrade or hydrolyze the phosphate group. An example of an agent that cleaves phosphate groups in cells are enzymes such as phosphatases in cells. Examples of phosphate-based linking groups are —O—P(O)(ORk)-O—, —O—P(S)(ORk)-O—, —O—P(S)(SRk)-O—, —S—P(O)(ORk)-O—, —O—P(O)(ORk)-S—, —S—P(O)(ORk)-S—, —O—P(S)(ORk)-S—, —S—P(S)(ORk)-O—, —O—P(O)(Rk)-O—, —O—P(S)(Rk)-O—, —S—P(O)(Rk)-O—, —S—P(S)(Rk)-O—, —S—P(O)(Rk)-S—, —O—P(S)(Rk)-S—. Preferred embodiments are —O—P(O)(OH)—O—, —O—P(S)(OH)—O—, —O—P(S)(SH)—O—, —S—P(O)(OH)—O—, —O—P(O)(OH)—S—, —S—P(O)(OH)—S—, —O—P(S)(OH)—S—, —S—P(S)(OH)—O—, —O—P(O)(H)—O—, —O—P(S)(H)—O—, —S—P(O)(H)—O—, —S—P(S)(H)—O—, —S—P(O)(H)—S—, —O—P(S)(H)—S—. A preferred embodiment is —O—P(O)(OH)—O—.

[0558] These candidates can be evaluated using methods analogous to those described above.

iii. Acid Cleavable Linking Groups

[0559] In certain embodiments, a cleavable linker comprises an acid cleavable linking group. An acid cleavable linking group is a linking group that is cleaved under acidic conditions. In preferred embodiments acid cleavable linking groups are cleaved in an acidic environment with a pH of about 6.5 or lower (e.g., about 6.0, 5.75, 5.5, 5.25, 5.0, or lower), or by agents such as enzymes that can act as a general acid. In a cell, specific low pH organelles, such as endosomes and lysosomes can provide a cleaving environment for acid cleavable linking groups. Examples of acid cleavable linking groups include but are not limited to hydrazones, esters, and esters of amino acids. Acid cleavable groups can have the general formula —C═NN—, C(O)O, or —OC(O). A preferred embodiment is when the carbon attached to the oxygen of the ester (the alkoxy group) is an aryl group, substituted alkyl group, or tertiary alkyl group such as dimethyl pentyl or t-butyl. These candidates can be evaluated using methods analogous to those described above.

iv. Ester-Based Cleavable Linking Groups

[0560] In certain embodiments, a cleavable linker comprises an ester-based cleavable linking group. An ester-based cleavable linking group is cleaved by enzymes such as esterases and amidases in cells.

[0561] Examples of ester-based cleavable linking groups include but are not limited to esters of alkylene, alkenylene and alkynylene groups. Ester cleavable linking groups have the general formula —C(O)O—, or —OC(O)—. These candidates can be evaluated using methods analogous to those described above.

v. Peptide-Based Cleavable Linking Groups

[0562] In yet another embodiment, a cleavable linker comprises a peptide-based cleavable linking group. A peptide-based cleavable linking group is cleaved by enzymes such as peptidases and proteases in cells. Peptide-based cleavable linking groups are peptide bonds formed between amino acids to yield oligopeptides (e.g., dipeptides, tripeptides etc.) and polypeptides. Peptide-based cleavable groups do not include the amide group (—C(O)NH—). The amide group can be formed between any alkylene, alkenylene or alkynelene. A peptide bond is a special type of amide bond formed between amino acids to yield peptides and proteins. The peptide based cleavage group is generally limited to the peptide bond (i.e., the amide bond) formed between amino acids yielding peptides and proteins and does not include the entire amide functional group. Peptide-based cleavable linking groups have the general formula —NHCHRAC(O)NHCHRBC(O)—, where RA and RB are the R groups of the two adjacent amino acids. These candidates can be evaluated using methods analogous to those described above.

[0563] In some embodiments, an iRNA of the disclosure is conjugated to a carbohydrate through a linker. Non-limiting examples of iRNA carbohydrate conjugates with linkers of the compositions and methods of the disclosure include, but are not limited to,

[chemical structure]

[chemical structure]

[chemical structure]

[0564] when one of X or Y is an oligonucleotide, the other is a hydrogen.

[0565] In certain embodiments of the compositions and methods of the disclosure, a ligand is one or more “GalNAc” (N-acetylgalactosamine) derivatives attached through a bivalent or trivalent branched linker.

[0566] In certain embodiments, a dsRNA of the disclosure is conjugated to a bivalent or trivalent branched linker selected from the group of structures shown in any of formula (XLV)-(XLVIII):

[chemical structure]

[0567] wherein:
[0568] q2A, q2B, q3A, q3B, q4A, q4B, q5A, q5B and q5C represent independently for each occurrence 0-20 and wherein the repeating unit can be the same or different;
[0569] p^{2A}, p^{2B}, p^{3A}, p^{3B}, p^{4A}, p^{4B}, p^{5A}, p^{5B}, p^{5C}, T^{2A}, T^{2B}, T^{3A}, T^{3B}, T^{4A}, T^{4B}, T^{4A}, T^{5B}, T^{5C} are each independently for each occurrence absent, CO, NH, O, S, OC(O), NHC(O), CH₂, CH₂NH or CH₂O; Q^{2A}, Q^{2B}, Q^{3A}, Q^{3B}, Q^{4A}, Q^{4B}, Q^{5A}, Q^{5B}, Q^{5C} are independently for each occurrence absent, alkylene, substituted alkylene wherein one or more methylenes can be interrupted or terminated by one or more of O, S, S(O), SO₂, N(R^{N}), C(R′)═C(R″), C—C or C(O); R^{2A}, R^{2B}, R^{3A}, R^{3B}, R^{4A}, R^{4B}, R^{5A}, R^{5B}, R^{5C} are each independently for each occurrence absent,

[chemical structure]

or heterocyclyl; L^{2A}, L^{2B}, L^{3A}, L^{3B}, L^{4A}, L^{4B}, L^{5A}, L^{5B} and L^{5C} represent the ligand; i.e. each independently for each occurrence a monosaccharide (such as GalNAc), disaccharide, trisaccharide, tetrasaccharide, oligosaccharide, or polysaccharide; and Ra is H or amino acid side chain. Trivalent conjugating GaINAc derivatives are particularly useful for use with RNAi agents for inhibiting the expression of a target gene, such as those of formula (XLIX):

[chemical structure]

[0570] wherein L^{5A}, L^{5B} and L^{5C} represent a monosaccharide, such as GalNAc derivative.

[0571] Examples of suitable bivalent and trivalent branched linker groups conjugating GalNAc derivatives include, but are not limited to, the structures recited above as formulas II, VII, X, XI, and XIII.

[0572] Representative U.S. Patents that teach the preparation of RNA conjugates include, but are not limited to, U.S. Pat. Nos. 4,828,979; 4,948,882; 5,218,105; 5,525,465; 5,541,313; 5,545,730; 5,552,538; 5,578,717, 5,580,731; 5,591,584; 5,109,124; 5,118,802; 5,138,045; 5,414,077; 5,486,603; 5,512,439; 5,578,718; 5,608,046; 4,587,044; 4,605,735; 4,667,025; 4,762,779; 4,789,737; 4,824,941; 4,835,263; 4,876,335; 4,904,582; 4,958,013; 5,082,830; 5,112,963; 5,214,136; 5,082,830; 5,112,963; 5,214,136; 5,245,022; 5,254,469; 5,258,506; 5,262,536; 5,272,250; 5,292,873; 5,317,098; 5,371,241, 5,391,723; 5,416,203, 5,451,463; 5,510,475; 5,512,667; 5,514,785; 5,565,552; 5,567,810; 5,574,142; 5,585,481; 5,587,371; 5,595,726; 5,597,696; 5,599,923; 5,599,928;5,688,941; 6,294,664; 6,320,017; 6,576,752; 6,783,931; 6,900,297; 7,037,646; and 8,106,022, the entire contents of each of which are hereby incorporated herein by reference.

[0573] It is not necessary for all positions in a given compound to be uniformly modified, and in fact more than one of the aforementioned modifications can be incorporated in a single compound or even at a single nucleoside within an iRNA. The present disclosure also includes iRNA compounds that are chimeric compounds.

[0574] “Chimeric” iRNA compounds or “chimeras,” in the context of this disclosure, are iRNA compounds, preferably dsRNA agents, that contain two or more chemically distinct regions, each made up of at least one monomer unit, i.e., a nucleotide in the case of a dsRNA compound. These iRNAs typically contain at least one region wherein the RNA is modified so as to confer upon the iRNA increased resistance to nuclease degradation, increased cellular uptake, or increased binding affinity for the target nucleic acid. An additional region of the iRNA can serve as a substrate for enzymes capable of cleaving RNA:DNA or RNA:RNA hybrids. By way of example, RNase H is a cellular endonuclease which cleaves the RNA strand of an RNA:DNA duplex. Activation of RNase H, therefore, results in cleavage of the RNA target, thereby greatly enhancing the efficiency of iRNA inhibition of gene expression. Consequently, comparable results can often be obtained with shorter iRNAs when chimeric dsRNAs are used, compared to phosphorothioate deoxy dsRNAs hybridizing to the same target region. Cleavage of the RNA target can be routinely detected by gel electrophoresis and, if necessary, associated nucleic acid hybridization techniques known in the art.

[0575] In certain instances, the RNA of an iRNA can be modified by a non-ligand group. A number of non-ligand molecules have been conjugated to iRNAs in order to enhance the activity, cellular distribution or cellular uptake of the iRNA, and procedures for performing such conjugations are available in the scientific literature. Such non-ligand moieties have included lipid moieties, such as cholesterol (Kubo, T. et al., Biochem. Biophys. Res. Comm., 2007, 365(1):54-61; Letsinger et al., Proc. Natl. Acad. Sci. USA, 1989, 86:6553), cholic acid (Manoharan et al., Bioorg. Med. Chem. Lett., 1994, 4:1053), a thioether, e.g., hexyl-S-tritylthiol (Manoharan et al., Ann. N.Y. Acad. Sci., 1992, 660:306; Manoharan et al., Bioorg. Med. Chem. Let., 1993, 3:2765), a thiocholesterol (Oberhauser et al., Nucl. Acids Res., 1992, 20:533), an aliphatic chain, e.g., dodecandiol or undecyl residues (Saison-Behmoaras et al., EMBO J., 1991, 10:111; Kabanov et al., FEBS Lett., 1990, 259:327; Svinarchuk et al., Biochimie, 1993, 75:49), a phospholipid, e.g., di-hexadecyl-rac-glycerol or triethylammonium 1,2-di-O-hexadecyl-rac-glycero-3-H-phosphonate (Manoharan et al., Tetrahedron Lett., 1995, 36:3651; Shea et al., Nucl. Acids Res., 1990, 18:3777), a polyamine or a polyethylene glycol chain (Manoharan et al., Nucleosides & Nucleotides, 1995, 14:969), or adamantane acetic acid (Manoharan et al., Tetrahedron Lett., 1995, 36:3651), a palmityl moiety (Mishra et al., Biochim. Biophys. Acta, 1995, 1264:229), or an octadecylamine or hexylamino-carbonyl-oxycholesterol moiety (Crooke et al., J Pharmacol. Exp. Ther., 1996, 277:923). Representative United States patents that teach the preparation of such RNA conjugates have been listed above. Typical conjugation protocols involve the synthesis of RNAs bearing an aminolinker at one or more positions of the sequence. The amino group is then reacted with the molecule being conjugated using appropriate coupling or activating reagents. The conjugation reaction can be performed either with the RNA still bound to the solid support or following cleavage of the RNA, in solution phase. Purification of the RNA conjugate by HPLC typically affords the pure conjugate.

### V. Delivery of an RNAi Agent of the Disclosure

[0576] The delivery of an RNAi agent of the disclosure to a cell e.g., a cell within a subject, such as a human subject (e.g., a subject in need thereof, such as a subject having a 4R-tau-associated disease, such as a 4R-tauopathy, e.g., PSP, CBD, AGD, MSTD, GGT, spAD, or rpAD), can be achieved in a number of different ways. For example, delivery may be performed by contacting a cell with an RNAi agent of the disclosure either in vitro or in vivo. In vivo delivery may also be performed directly by administering a composition comprising an RNAi agent, e.g., a dsRNA, to a subject. Alternatively, in vivo delivery may be performed indirectly by administering one or more vectors that encode and direct the expression of the RNAi agent. These alternatives are discussed further below.

[0577] In general, any method of delivering a nucleic acid molecule (in vitro or in vivo) can be adapted for use with an RNAi agent of the disclosure (see e.g., Akhtar S. and Julian R L., (1992) Trends Cell. Biol. 2(5):139-144 and WO94/02595, which are incorporated herein by reference in their entireties). For in vivo delivery, factors to consider in order to deliver an RNAi agent include, for example, biological stability of the delivered agent, prevention of non-specific effects, and accumulation of the delivered agent in the target tissue. The non-specific effects of an RNAi agent can be minimized by local administration, for example, by direct injection or implantation into a tissue or topically administering the preparation. Local administration to a treatment site maximizes local concentration of the agent, limits the exposure of the agent to systemic tissues that can otherwise be harmed by the agent or that can degrade the agent, and permits a lower total dose of the RNAi agent to be administered. Several studies have shown successful knockdown of gene products when an RNAi agent is administered locally. For example, intraocular delivery of a VEGF dsRNA by intravitreal injection in cynomolgus monkeys (Tolentino, M J. et al., (2004) Retina 24:132-138) and subretinal injections in mice (Reich, S J. et al. (2003) Mol. Vis. 9:210-216) were both shown to prevent neovascularization in an experimental model of age-related macular degeneration. In addition, direct intratumoral injection of a dsRNA in mice reduces tumor volume (Pille, J. et al. (2005) Mol. Ther. 11:267-274) and can prolong survival of tumor-bearing mice (Kim, W J. et al., (2006) Mol. Ther. 14:343-350; Li, S. et al., (2007) Mol. Ther. 15:515-523). RNA interference has also shown success with local delivery to the CNS by direct injection (Dorn, G. et al., (2004) Nucleic Acids 32:e49; Tan, P H. et al. (2005) Gene Ther. 12:59-66; Makimura, H. et al. (2002) BMC Neurosci. 3:18; Shishkina, G T., et al. (2004) Neuroscience 129:521-528; Thakker, E R., et al. (2004) Proc. Natl. Acad. Sci. U.S.A. 101:17270-17275; Akaneya,Y., et al. (2005) J. Neurophysiol. 93:594-602) and to the lungs by intranasal administration (Howard, K A. et al., (2006) Mol. Ther. 14:476-484; Zhang, X. et al., (2004) J Biol. Chem. 279:10677-10684; Bitko, V. et al., (2005) Nat. Med. 11:50-55). For administering an RNAi agent systemically for the treatment of a disease, the RNA can be modified or alternatively delivered using a drug delivery system; both methods act to prevent the rapid degradation of the dsRNA by endo- and exo-nucleases in vivo. Modification of the RNA or the pharmaceutical carrier can also permit targeting of the RNAi agent to the target tissue and avoid undesirable off-target effects (e.g., without wishing to be bound by theory, use of GNAs as described herein has been identified to destabilize the seed region of a dsRNA, resulting in enhanced preference of such dsRNAs for on-target effectiveness, relative to off-target effects, as such off-target effects are significantly weakened by such seed region destabilization). RNAi agents can be modified by chemical conjugation to lipophilic groups such as cholesterol to enhance cellular uptake and prevent degradation. For example, an RNAi agent directed against ApoB conjugated to a lipophilic cholesterol moiety was injected systemically into mice and resulted in knockdown of apoB mRNA in both the liver and jejunum (Soutschek, J. et al., (2004) Nature 432:173-178). Conjugation of an RNAi agent to an aptamer has been shown to inhibit tumor growth and mediate tumor regression in a mouse model of prostate cancer (McNamara, J O. et al., (2006) Nat. Biotechnol. 24:1005-1015). In an alternative embodiment, the RNAi agent can be delivered using drug delivery systems such as a nanoparticle, a dendrimer, a polymer, liposomes, or a cationic delivery system. Positively charged cationic delivery systems facilitate binding of molecule RNAi agent (negatively charged) and also enhance interactions at the negatively charged cell membrane to permit efficient uptake of an RNAi agent by the cell. Cationic lipids, dendrimers, or polymers can either be bound to an RNAi agent, or induced to form a vesicle or micelle (see e.g., Kim SH. et al., (2008) Journal of Controlled Release 129(2):107-116) that encases an RNAi agent. The formation of vesicles or micelles further prevents degradation of the RNAi agent when administered systemically. Methods for making and administering cationic-RNAi agent complexes are well within the abilities of one skilled in the art (see e.g., Sorensen, D R., et al. (2003) J. Mol. Biol 327:761-766; Verma, U N. et al., (2003) Clin. Cancer Res. 9:1291-1300; Arnold, A S et al. (2007) J. Hypertens. 25:197-205, which are incorporated herein by reference in their entirety). Some non-limiting examples of drug delivery systems useful for systemic delivery of RNAi agents include DOTAP (Sorensen, D R., et al (2003), supra; Verma, U N. et al., (2003), supra), Oligofectamine, “solid nucleic acid lipid particles” (Zimmermann, T S. et al., (2006) Nature 441:111-114), cardiolipin (Chien, P Y. et al., (2005) Cancer Gene Ther. 12:321-328; Pal, A. et al., (2005) Int J. Oncol. 26:1087-1091), polyethyleneimine (Bonnet ME. et al., (2008) Pharm. Res. August 16 Epub ahead of print; Aigner, A. (2006) J. Biomed. Biotechnol. 71659), Arg-Gly-Asp (RGD) peptides (Liu, S. (2006) Mol. Pharm. 3:472-487), and polyamidoamines (Tomalia, D A. et al., (2007) Biochem. Soc. Trans. 35:61-67; Yoo, H. et al., (1999) Pharm. Res. 16:1799-1804). In some embodiments, an RNAi agent forms a complex with cyclodextrin for systemic administration. Methods for administration and pharmaceutical compositions of RNAi agents and cyclodextrins can be found in U.S. Patent No. 7, 427, 605, which is herein incorporated by reference in its entirety.

[0578] Certain aspects of the instant disclosure relate to a method of reducing the expression of 4R-tau in a cell, comprising contacting said cell with the double-stranded RNAi agent of the disclosure. In one embodiment, the cell is an extrahepatic cell, optionally a CNS cell. In other embodiment, the cell is a hepatic cell.

[0579] Another aspect of the disclosure relates to a method of reducing the expression of 4R-tau in a subject, comprising administering to the subject the double-stranded RNAi agent of the disclosure. Another aspect of the disclosure relates to a method of treating a subject having a CNS disorder (neurodegenerative disorder), comprising administering to the subject a therapeutically effective amount of the double-stranded MAPT-targeting RNAi agent of the disclosure, thereby treating the subject. The neurodegenerative disorder of the subject is associated with an abnormality of MAPT gene encoded protein 4R-tau. The abnormality of MAPT gene encoded protein 4R-tau may result in aggregation of 4R-tau in subject's brain.

[0580] Exemplary CNS disorders that can be treated by the method of the disclosure include 4R-tau-associated diseases, such as 4R-tauopathies, e.g., PSP, CBD, AGD, MSTD, GGT, spAD, or rpAD.

[0581] In one embodiment, the double-stranded RNAi agent is administered intrathecally. By intrathecal administration of the double-stranded RNAi agent, the method can reduce the expression of a MAPT target gene encoding 4R-tau in a brain (e.g., striatum) or spine tissue, for instance, cortex, cerebellum, cervical spine, lumbar spine, and thoracic spine, immune cells such as monocytes and T-cells.

[0582] For ease of exposition the formulations, compositions and methods in this section are discussed largely with regard to modified siRNA compounds. It may be understood, however, that these formulations, compositions and methods can be practiced with other siRNA compounds, e.g., unmodified siRNA compounds, and such practice is within the disclosure. A composition that includes an RNAi agent can be delivered to a subject by a variety of routes. Exemplary routes include: intrathecal, intravenous, topical, rectal, anal, vaginal, nasal, pulmonary, and ocular.

[0583] The RNAi agents of the disclosure can be incorporated into pharmaceutical compositions suitable for administration. Such compositions typically include one or more species of RNAi agent and a pharmaceutically acceptable carrier. As used herein the language “pharmaceutically acceptable carrier” is intended to include any and all solvents, dispersion media, coatings, antibacterial and antifungal agents, isotonic and absorption delaying agents, and the like, compatible with pharmaceutical administration. The use of such media and agents for pharmaceutically active substances is well known in the art. Except insofar as any conventional media or agent is incompatible with the active compound, use thereof in the compositions is contemplated. Supplementary active compounds can also be incorporated into the compositions.

[0584] The pharmaceutical compositions of the present disclosure may be administered in a number of ways depending upon whether local or systemic treatment is desired and upon the area to be treated. Administration may be topical (including ophthalmic, vaginal, rectal, intranasal, transdermal), intrathecal, oral, or parenteral. Parenteral administration includes intravenous drip, subcutaneous, intraperitoneal or intramuscular injection, or intrathecal or intraventricular administration.

[0585] The route and site of administration may be chosen to enhance targeting. For example, to target neural or spinal tissue, intrathecal injection would be a logical choice. Lung cells might be targeted by administering the RNAi agent in aerosol form. The vascular endothelial cells could be targeted by coating a balloon catheter with the RNAi agent and mechanically introducing the RNA.

[0586] Formulations for topical administration may include transdermal patches, ointments, lotions, creams, gels, drops, suppositories, sprays, liquids, and powders. Conventional pharmaceutical carriers, aqueous, powder or oily bases, thickeners and the like may be necessary or desirable. Coated condoms, gloves and the like may also be useful.

[0587] Compositions for oral administration include powders or granules, suspensions or solutions in water, syrups, elixirs or non-aqueous media, tablets, capsules, lozenges, or troches. In the case of tablets, carriers that can be used include lactose, sodium citrate and salts of phosphoric acid. Various disintegrants such as starch, and lubricating agents such as magnesium stearate, sodium lauryl sulfate and talc, are commonly used in tablets. For oral administration in capsule form, useful diluents are lactose and high molecular weight polyethylene glycols. When aqueous suspensions are required for oral use, the nucleic acid compositions can be combined with emulsifying and suspending agents. If desired, certain sweetening or flavoring agents can be added.

[0588] Compositions for intrathecal or intraventricular administration may include sterile aqueous solutions which may also contain buffers, diluents, and other suitable additives.

[0589] Formulations for parenteral administration may include sterile aqueous solutions which may also contain buffers, diluents, and other suitable additives. Intraventricular injection may be facilitated by an intraventricular catheter, for example, attached to a reservoir. For intravenous use, the total concentration of solutes may be controlled to render the preparation isotonic.

[0590] In one embodiment, the administration of the siRNA compound, e.g., a double-stranded siRNA compound, or ssiRNA compound, composition is parenteral, e.g., intravenous (e.g., as a bolus or as a diffusible infusion), intradermal, intraperitoneal, intramuscular, intrathecal, intraventricular, intracranial, subcutaneous, transmucosal, buccal, sublingual, endoscopic, rectal, oral, vaginal, topical, pulmonary, intranasal, urethral, or ocular. Administration can be provided by the subject or by another person, e.g., a health care provider. The medication can be provided in measured doses or in a dispenser which delivers a metered dose. Selected modes of delivery are discussed in more detail below.

### A. Intrathecal Administration

[0591] In one embodiment, the double-stranded RNAi agent is delivered by intrathecal injection (i.e., injection into the spinal fluid which bathes the brain and spinal cord tissue). Intrathecal injection of RNAi agents into the spinal fluid can be performed as a bolus injection or via minipumps which can be implanted beneath the skin, providing a regular and constant delivery of siRNA into the spinal fluid. The circulation of the spinal fluid from the choroid plexus, where it is produced, down around the spinal cord and dorsal root ganglia and subsequently up past the cerebellum and over the cortex to the arachnoid granulations, where the fluid can exit the CNS, that, depending upon size, stability, and solubility of the compounds injected, molecules delivered intrathecally could hit targets throughout the entire CNS.

[0592] In some embodiments, the intrathecal administration is via a pump. The pump may be a surgically implanted osmotic pump. In one embodiment, the osmotic pump is implanted into the subarachnoid space of the spinal canal to facilitate intrathecal administration.

[0593] In some embodiments, the intrathecal administration is via an intrathecal delivery system for a pharmaceutical including a reservoir containing a volume of the pharmaceutical agent, and a pump configured to deliver a portion of the pharmaceutical agent contained in the reservoir. More details about this intrathecal delivery system may be found in WO 2015/116658, which is incorporated by reference in its entirety.

[0594] The amount of intrathecally injected RNAi agents may vary from one target gene to another target gene and the appropriate amount that has to be applied may have to be determined individually for each target gene. Typically, this amount ranges from 10 g to 2 mg, preferably 50 g to 1500 g, more preferably 100 g to 1000 g.

B. Vector encoded RNAi agents of the Disclosure

[0595] RNAi agents targeting the hotspot within exon 10 of the MAPT gene can be expressed from transcription units inserted into DNA or RNA vectors (see, e.g., Couture, A, et al., TIG. (1996), 12:5-10; WO 00/22113, WO 00/22114, and U.S. Pat. No. 6,054,299). Expression is preferably sustained (months or longer), depending upon the specific construct used and the target tissue or cell type. These transgenes can be introduced as a linear construct, a circular plasmid, or a viral vector, which can be an integrating or non-integrating vector. The transgene can also be constructed to permit it to be inherited as an extrachromosomal plasmid (Gassmann, et al., (1995) Proc. Natl. Acad. Sci. USA 92:1292).

[0596] The individual strand or strands of an RNAi agent can be transcribed from a promoter on an expression vector. Where two separate strands are to be expressed to generate, for example, a dsRNA, two separate expression vectors can be co-introduced (e.g., by transfection or infection) into a target cell. Alternatively, each individual strand of a dsRNA can be transcribed by promoters both of which are located on the same expression plasmid. In one embodiment, a dsRNA is expressed as inverted repeat polynucleotides joined by a linker polynucleotide sequence such that the dsRNA has a stem and loop structure.

[0597] RNAi agent expression vectors are generally DNA plasmids or viral vectors. Expression vectors compatible with eukaryotic cells, preferably those compatible with vertebrate cells, can be used to produce recombinant constructs for the expression of an RNAi agent as described herein. Delivery of RNAi agent expressing vectors can be systemic, such as by intravenous or intramuscular administration, by administration to target cells ex-planted from the patient followed by reintroduction into the patient, or by any other means that allows for introduction into a desired target cell.

[0598] Viral vector systems which can be utilized with the methods and compositions described herein include, but are not limited to, (a) adenovirus vectors; (b) retrovirus vectors, including but not limited to lentiviral vectors, moloney murine leukemia virus, etc.; (c) adeno-associated virus vectors; (d) herpes simplex virus vectors; (e) SV 40 vectors; (f) polyoma virus vectors; (g) papilloma virus vectors; (h) picornavirus vectors; (i) pox virus vectors such as an orthopox, e.g., vaccinia virus vectors or avipox, e.g. canary pox or fowl pox; and (j) a helper-dependent or gutless adenovirus. Replication-defective viruses can also be advantageous. Different vectors will or will not become incorporated into the cells' genome. The constructs can include viral sequences for transfection, if desired. Alternatively, the construct can be incorporated into vectors capable of episomal replication, e.g. EPV and EBV vectors. Constructs for the recombinant expression of an RNAi agent will generally require regulatory elements, e.g., promoters, enhancers, etc., to ensure the expression of the RNAi agent in target cells. Other aspects to consider for vectors and constructs are known in the art.

### VI. Pharmaceutical Compositions of the Disclosure

[0599] The present disclosure also includes pharmaceutical compositions and formulations which include the RNAi agents of the disclosure. In one embodiment, provided herein are pharmaceutical compositions containing an RNAi agent, as described herein, and a pharmaceutically acceptable carrier. The pharmaceutical compositions containing the RNAi agent are useful for treating a disease or disorder associated with the expression or activity of 4R-tau, e.g., 4R-tau-associated disease.

[0600] In some embodiments, the pharmaceutical composition of the disclosure is the dsRNA agent for reducing abberant expression of exon 10-containing MAPT transcripts.

[0601] In some embodiments, the pharmaceutical compositions of the disclosure are sterile. In another embodiment, the pharmaceutical compositions of the disclosure are pyrogen free.

[0602] Such pharmaceutical compositions are formulated based on the mode of delivery. One example is compositions that are formulated for systemic administration via parenteral delivery, e.g., by intravenous (IV), intramuscular (IM), or for subcutaneous (subQ) delivery. Another example is compositions that are formulated for direct delivery into the CNS, e.g., by intrathecal or intravitreal routes of injection, optionally by infusion into the brain (e.g., striatum), such as by continuous pump infusion.

[0603] The pharmaceutical compositions of the disclosure may be administered in dosages sufficient to inhibit expression of a 4R-tau isoform. In general, a suitable dose of an RNAi agent of the disclosure will be in the range of about 0.001 to about 200.0 milligrams per kilogram body weight of the recipient per day, generally in the range of about 1 to 50 mg per kilogram body weight per day.

[0604] A repeat-dose regimen may include administration of a therapeutic amount of an RNAi agent on a regular basis, such as monthly to once every six months. In certain embodiments, the RNAi agent is administered about once per quarter (i.e., about once every three months) to about twice per year.

[0605] After an initial treatment regimen (e.g., loading dose), the treatments can be administered on a less frequent basis.

[0606] In other embodiments, a single dose of the pharmaceutical compositions can be long lasting, such that subsequent doses are administered at not more than 1, 2, 3, or 4 or more month intervals. In some embodiments of the disclosure, a single dose of the pharmaceutical compositions of the disclosure is administered once per month. In other embodiments of the disclosure, a single dose of the pharmaceutical compositions of the disclosure is administered once per quarter to twice per year.

[0607] The skilled artisan will appreciate that certain factors can influence the dosage and timing required to effectively treat a subject, including but not limited to the severity of the disease or disorder, previous treatments, the general health or age of the subject, and other diseases present. Moreover, treatment of a subject with a therapeutically effective amount of a composition can include a single treatment or a series of treatments.

[0608] Advances in mouse genetics have generated a number of mouse models for the study of various human diseases, such as PSP, CBD, and AGD that would benefit from reduction in the expression of 4R-tau. Such models can be used for in vivo testing of RNAi agents, as well as for determining a therapeutically effective dose. Suitable rodent models are known in the art and include, for example, those described in, for example, Palleis et al. (2021) Mov Disord. 2021 April; 36(4):883-894; Blair et al. (2015) Acta Neuropathol Commun. 2015 Jan. 31; 3:8; Denk et al. (2009) Neurobiol Aging. 2009 January; 30(1): 1-13; and Ferrer et al. (2020) Front Mol Neurosci. 2020 Jun. 24; 13:101.

[0609] The pharmaceutical compositions of the present disclosure can be administered in a number of ways depending upon whether local or systemic treatment is desired and upon the area to be treated. Administration can be topical (e.g., by a transdermal patch), pulmonary, e.g., by inhalation or insufflation of powders or aerosols, including by nebulizer; intratracheal, intranasal, epidermal and transdermal, oral or parenteral. Parenteral administration includes intravenous, intraarterial, subcutaneous, intraperitoneal or intramuscular injection or infusion; subdermal, e.g., via an implanted device; or intracranial, e.g., by intraparenchymal, intrathecal or intraventricular, administration.

[0610] The RNAi agents can be delivered in a manner to target a particular tissue, such as the CNS (e.g., neuronal, glial or vascular tissue of the brain).

[0611] Pharmaceutical compositions and formulations for topical administration can include transdermal patches, ointments, lotions, creams, gels, drops, suppositories, sprays, liquids and powders. Conventional pharmaceutical carriers, aqueous, powder or oily bases, thickeners and the like can be necessary or desirable. Coated condoms, gloves and the like can also be useful. Suitable topical formulations include those in which the RNAi agents featured in the disclosure are in admixture with a topical delivery agent such as lipids, liposomes, fatty acids, fatty acid esters, steroids, chelating agents and surfactants. Suitable lipids and liposomes include neutral (e.g., dioleoylphosphatidyl DOPE ethanolamine, dimyristoylphosphatidyl choline DMPC, distearolyphosphatidyl choline) negative (e.g., dimyristoylphosphatidyl glycerol DMPG) and cationic (e.g., dioleoyltetramethylaminopropyl DOTAP and dioleoylphosphatidyl ethanolamine DOTMA). RNAi agents featured in the disclosure can be encapsulated within liposomes or can form complexes thereto, in particular to cationic liposomes. Alternatively, RNAi agents can be complexed to lipids, in particular to cationic lipids. Suitable fatty acids and esters include but are not limited to arachidonic acid, oleic acid, eicosanoic acid, lauric acid, caprylic acid, capric acid, myristic acid, palmitic acid, stearic acid, linoleic acid, linolenic acid, dicaprate, tricaprate, monoolein, dilaurin, glyceryl 1-monocaprate, 1-dodecylazacycloheptan-2-one, an acylcarnitine, an acylcholine, or a C₁₋₂₀ alkyl ester (e.g., isopropylmyristate IPM), monoglyceride, diglyceride or pharmaceutically acceptable salt thereof. Topical formulations are described in detail in U.S. Pat. No. 6,747,014, which is incorporated herein by reference.

### A. RNAi Agent Formulations Comprising Membranous Molecular Assemblies

[0612] An RNAi agent for use in the compositions and methods of the disclosure can be formulated for delivery in a membranous molecular assembly, e.g., a liposome or a micelle. As used herein, the term “liposome” refers to a vesicle composed of amphiphilic lipids arranged in at least one bilayer, e.g., one bilayer or a plurality of bilayers. Liposomes include unilamellar and multilamellar vesicles that have a membrane formed from a lipophilic material and an aqueous interior. The aqueous portion contains the RNAi agent composition. The lipophilic material isolates the aqueous interior from an aqueous exterior, which typically does not include the RNAi agent composition, although in some examples, it may. Liposomes are useful for the transfer and delivery of active ingredients to the site of action. Because the liposomal membrane is structurally similar to biological membranes, when liposomes are applied to a tissue, the liposomal bilayer fuses with bilayer of the cellular membranes. As the merging of the liposome and cell progresses, the internal aqueous contents that include the RNAi agent are delivered into the cell where the RNAi agent can specifically bind to a target RNA and can mediate RNAi. In some cases, the liposomes are also specifically targeted, e.g., to direct the RNAi agent to particular cell types.

[0613] A liposome containing an RNAi agent can be prepared by a variety of methods. In one example, the lipid component of a liposome is dissolved in a detergent so that micelles are formed with the lipid component. For example, the lipid component can be an amphipathic cationic lipid or lipid conjugate. The detergent can have a high critical micelle concentration and may be nonionic. Exemplary detergents include cholate, CHAPS, octylglucoside, deoxycholate, and lauroyl sarcosine. The RNAi agent preparation is then added to the micelles that include the lipid component. The cationic groups on the lipid interact with the RNAi agent and condense around the RNAi agent to form a liposome. After condensation, the detergent is removed, e.g., by dialysis, to yield a liposomal preparation of RNAi agent.

[0614] If necessary a carrier compound that assists in condensation can be added during the condensation reaction, e.g., by controlled addition. For example, the carrier compound can be a polymer other than a nucleic acid (e.g., spermine or spermidine). pH can also be adjusted to favor condensation.

[0615] Methods for producing stable polynucleotide delivery vehicles, which incorporate a polynucleotide/cationic lipid complex as structural components of the delivery vehicle, are further described in, e.g., WO 96/37194, the entire contents of which are incorporated herein by reference. Liposome formation can also include one or more aspects of exemplary methods described in Felgner, P. L. et al., (1987) Proc. Natl. Acad. Sci. USA 8:7413-7417; U.S. Pat. Nos. 4,897,355; 5,171,678; Bangham et al., (1965) M Mol. Biol. 23:238; Olson et al., (1979) Biochim. Biophys. Acta 557:9; Szoka et al., (1978) Proc. Natl. Acad. Sci. 75: 4194; Mayhew et al., (1984) Biochim. Biophys. Acta 775:169; Kim et al., (1983) Biochim. Biophys. Acta 728:339; and Fukunaga et al., (1984) Endocrinol. 115:757. Commonly used techniques for preparing lipid aggregates of appropriate size for use as delivery vehicles include sonication and freeze-thaw plus extrusion (see, e.g., Mayer et al., (1986) Biochim. Biophys. Acta 858:161. Microfluidization can be used when consistently small (50 to 200 nm) and relatively uniform aggregates are desired (Mayhew et al., (1984) Biochim. Biophys. Acta 775:169. These methods are readily adapted to packaging RNAi agent preparations into liposomes.

[0616] Liposomes fall into two broad classes. Cationic liposomes are positively charged liposomes which interact with the negatively charged nucleic acid molecules to form a stable complex. The positively charged nucleic acid/liposome complex binds to the negatively charged cell surface and is internalized in an endosome. Due to the acidic pH within the endosome, the liposomes are ruptured, releasing their contents into the cell cytoplasm (Wang et al. (1987) Biochem. Biophys. Res. Commun., 147:980-985).

[0617] Liposomes, which are pH-sensitive or negatively charged, entrap nucleic acids rather than complex with them. Since both the nucleic acid and the lipid are similarly charged, repulsion rather than complex formation occurs. Nevertheless, some nucleic acid is entrapped within the aqueous interior of these liposomes. pH sensitive liposomes have been used to deliver nucleic acids encoding the thymidine kinase gene to cell monolayers in culture. Expression of the exogenous gene was detected in the target cells (Zhou et al. (1992) Journal of Controlled Release, 19:269-274).

[0618] One major type of liposomal composition includes phospholipids other than naturally-derived phosphatidylcholine. Neutral liposome compositions, for example, can be formed from dimyristoyl phosphatidylcholine (DMPC) or dipalmitoyl phosphatidylcholine (DPPC). Anionic liposome compositions generally are formed from dimyristoyl phosphatidylglycerol, while anionic fusogenic liposomes are formed primarily from dioleoyl phosphatidylethanolamine (DOPE). Another type of liposomal composition is formed from phosphatidylcholine (PC) such as, for example, soybean PC, and egg PC. Another type is formed from mixtures of phospholipid or phosphatidylcholine or cholesterol.

[0619] Examples of other methods to introduce liposomes into cells in vitro and in vivo include U.S. Pat. Nos. 5,283,185; 5,171,678; WO 94/00569; WO 93/24640; WO 91/16024; Felgner, (1994) J. Biol. Chem. 269:2550; Nabel, (1993) Proc. Natl. Acad. Sci. 90:11307; Nabel, (1992) Human Gene Ther. 3:649; Gershon, (1993) Biochem. 32:7143; and Strauss, (1992) EMBO J. 11:417.

[0620] Non-ionic liposomal systems have also been examined to determine their utility in the delivery of drugs to the skin, in particular systems comprising non-ionic surfactant and cholesterol. Non-ionic liposomal formulations comprising NOVASOME™ I (glyceryl dilaurate/cholesterol/polyoxyethylene-10-stearyl ether) and NOVASOME™ II (glyceryl distearate/cholesterol/polyoxyethylene-10-stearyl ether) were used to deliver cyclosporin-A into the dermis of mouse skin. Results indicated that such non-ionic liposomal systems were effective in facilitating the deposition of cyclosporine A into different layers of the skin (Hu et al., (1994) S.T.P.Pharma. Sci., 4(6):466).

[0621] Liposomes also include “sterically stabilized” liposomes, a term which, as used herein, refers to liposomes comprising one or more specialized lipids that, when incorporated into liposomes, result in enhanced circulation lifetimes relative to liposomes lacking such specialized lipids. Examples of sterically stabilized liposomes are those in which part of the vesicle-forming lipid portion of the liposome (A) comprises one or more glycolipids, such as monosialoganglioside G_{MI}, or (B) is derivatized with one or more hydrophilic polymers, such as a polyethylene glycol (PEG) moiety. While not wishing to be bound by any particular theory, it is thought in the art that, at least for sterically stabilized liposomes containing gangliosides, sphingomyelin, or PEG-derivatized lipids, the enhanced circulation half-life of these sterically stabilized liposomes derives from a reduced uptake into cells of the reticuloendothelial system (RES) (Allen et al., (1987) FEBS Letters, 223:42; Wu et al., (1993) Cancer Research, 53:3765).

[0622] Various liposomes comprising one or more glycolipids are known in the art. Papahadjopoulos et al. (Ann. N.Y. Acad. Sci., (1987), 507:64) reported the ability of monosialoganglioside GM, galactocerebroside sulfate and phosphatidylinositol to improve blood half-lives of liposomes. These findings were expounded upon by Gabizon et al. (Proc. Natl. Acad. Sci. U.S.A., (1988), 85,:6949). U.S. Pat. No. 4,837,028 and WO 88/04924, both to Allen et al., disclose liposomes comprising (1) sphingomyelin and (2) the ganglioside G_{Ml} or a galactocerebroside sulfate ester. U.S. Pat. No. 5,543,152 (Webb et al.) discloses liposomes comprising sphingomyelin. Liposomes comprising 1,2-sn-dimyristoylphosphatidylcholine are disclosed in WO 97/13499 (Lim et al).

[0623] In one embodiment, cationic liposomes are used. Cationic liposomes possess the advantage of being able to fuse to the cell membrane. Non-cationic liposomes, although not able to fuse as efficiently with the plasma membrane, are taken up by macrophages in vivo and can be used to deliver RNAi agents to macrophages.

[0624] Further advantages of liposomes include: liposomes obtained from natural phospholipids are biocompatible and biodegradable; liposomes can incorporate a wide range of water and lipid soluble drugs; liposomes can protect encapsulated RNAi agents in their internal compartments from metabolism and degradation (Rosoff, in “Pharmaceutical Dosage Forms,” Lieberman, Rieger and Banker (Eds.), 1988, volume 1, p. 245). Important considerations in the preparation of liposome formulations are the lipid surface charge, vesicle size and the aqueous volume of the liposomes.

[0625] A positively charged synthetic cationic lipid, N-[1-(2,3-dioleyloxy)propyl]-N,N,N-trimethylammonium chloride (DOTMA) can be used to form small liposomes that interact spontaneously with nucleic acid to form lipid-nucleic acid complexes which are capable of fusing with the negatively charged lipids of the cell membranes of tissue culture cells, resulting in delivery of RNAi agent (see, e.g., Felgner, P. L. et al., (1987) Proc. Natl. Acad. Sci. USA 8:7413-7417, and U.S. Pat. No. 4,897,355 for a description of DOTMA and its use with DNA).

[0626] A DOTMA analogue, 1,2-bis(oleoyloxy)-3-(trimethylammonia)propane (DOTAP) can be used in combination with a phospholipid to form DNA-complexing vesicles. LIPOFECTIN™ Bethesda Research Laboratories, Gaithersburg, Md.) is an effective agent for the delivery of highly anionic nucleic acids into living tissue culture cells that comprise positively charged DOTMA liposomes which interact spontaneously with negatively charged polynucleotides to form complexes. When enough positively charged liposomes are used, the net charge on the resulting complexes is also positive. Positively charged complexes prepared in this way spontaneously attach to negatively charged cell surfaces, fuse with the plasma membrane, and efficiently deliver functional nucleic acids into, for example, tissue culture cells. Another commercially available cationic lipid, 1,2-bis(oleoyloxy)-3,3-(trimethylammonia)propane (“DOTAP”) (Boehringer Mannheim, Indianapolis, Indiana) differs from DOTMA in that the oleoyl moieties are linked by ester, rather than ether linkages.

[0627] Other reported cationic lipid compounds include those that have been conjugated to a variety of moieties including, for example, carboxyspermine which has been conjugated to one of two types of lipids and includes compounds such as 5-carboxyspermylglycine dioctaoleoylamide (“DOGS”) (TRANSFECTAM™, Promega, Madison, Wisconsin) and dipalmitoylphosphatidylethanolamine 5-carboxyspermyl-amide (“DPPES”) (see, e.g., U.S. Pat. No. 5,171,678).

[0628] Another cationic lipid conjugate includes derivatization of the lipid with cholesterol (“DC-Chol”) which has been formulated into liposomes in combination with DOPE (See, Gao, X. and Huang, L., (1991) Biochim. Biophys. Res. Commun. 179:280). Lipopolylysine, made by conjugating polylysine to DOPE, has been reported to be effective for transfection in the presence of serum (Zhou, X. et al., (1991) Biochim. Biophys. Acta 1065:8). For certain cell lines, these liposomes containing conjugated cationic lipids, are said to exhibit lower toxicity and provide more efficient transfection than the DOTMA-containing compositions. Other commercially available cationic lipid products include DMRIE and DMRIE-HP (Vical, La Jolla, California) and Lipofectamine (DOSPA) (Life Technology, Inc., Gaithersburg, Maryland). Other cationic lipids suitable for the delivery of oligonucleotides are described in WO 98/39359 and WO 96/37194.

[0629] Liposomal formulations are particularly suited for topical administration; liposomes present several advantages over other formulations. Such advantages include reduced side effects related to high systemic absorption of the administered drug, increased accumulation of the administered drug at the desired target, and the ability to administer RNAi agent into the skin. In some implementations, liposomes are used for delivering RNAi agent to epidermal cells and also to enhance the penetration of RNAi agent into dermal tissues, e.g., into skin. For example, the liposomes can be applied topically. Topical delivery of drugs formulated as liposomes to the skin has been documented (see, e.g., Weiner et al., (1992) Journal of Drug Targeting, vol. 2,405-410 and du Plessis et al., (1992) Antiviral Research, 18:259-265; Mannino, R. J. and Fould-Fogerite, S., (1998) Biotechniques 6:682-690; Itani, T. et al., (1987) Gene 56:267-276; Nicolau, C. et al. (1987) Meth. Enzymol. 149:157-176; Straubinger, R. M. and Papahadjopoulos, D. (1983) Meth. Enzymol. 101:512-527; Wang, C. Y. and Huang, L., (1987) Proc. Natl. Acad. Sci. USA 84:7851-7855).

[0630] Non-ionic liposomal systems have also been examined to determine their utility in the delivery of drugs to the skin, in particular systems comprising non-ionic surfactant and cholesterol. Non-ionic liposomal formulations comprising Novasome I (glyceryl dilaurate/cholesterol/polyoxyethylene-10-stearyl ether) and Novasome II (glyceryl distearate/cholesterol/polyoxyethylene-10-stearyl ether) were used to deliver a drug into the dermis of mouse skin. Such formulations with RNAi agent are useful for treating a dermatological disorder.

[0631] Liposomes that include RNAi agents can be made highly deformable. Such deformability can enable the liposomes to penetrate through pore that are smaller than the average radius of the liposome. For example, transfersomes are a type of deformable liposomes. Transfersomes can be made by adding surface edge activators, usually surfactants, to a standard liposomal composition. Transfersomes that include RNAi agent can be delivered, for example, subcutaneously by infection in order to deliver RNAi agent to keratinocytes in the skin. In order to cross intact mammalian skin, lipid vesicles must pass through a series of fine pores, each with a diameter less than 50 nm, under the influence of a suitable transdermal gradient. In addition, due to the lipid properties, these transfersomes can be self-optimizing (adaptive to the shape of pores, e.g., in the skin), self-repairing, and can frequently reach their targets without fragmenting, and often self-loading.

[0632] Other formulations amenable to the present disclosure are described in U.S. provisional application Ser. No. 61/018,616, filed Jan. 2, 2008; 61/018,611, filed Jan. 2, 2008; 61/039,748, filed Mar. 26, 2008; 61/047,087, filed Apr. 22, 2008 and 61/051,528, filed May 8, 2008. PCT application number PCT/US2007/080331, filed Oct. 3, 2007, also describes formulations that are amenable to the present disclosure.

[0633] Transfersomes, yet another type of liposomes, are highly deformable lipid aggregates which are attractive candidates for drug delivery vehicles. Transfersomes can be described as lipid droplets which are so highly deformable that they are easily able to penetrate through pores which are smaller than the droplet. Transfersomes are adaptable to the environment in which they are used, e.g., they are self-optimizing (adaptive to the shape of pores in the skin), self-repairing, frequently reach their targets without fragmenting, and often self-loading. To make transfersomes it is possible to add surface edge-activators, usually surfactants, to a standard liposomal composition. Transfersomes have been used to deliver serum albumin to the skin. The transfersome-mediated delivery of serum albumin has been shown to be as effective as subcutaneous injection of a solution containing serum albumin.

[0634] Surfactants find wide application in formulations such as those described herein, particularly in emulsions (including microemulsions) and liposomes. The most common way of classifying and ranking the properties of the many different types of surfactants, both natural and synthetic, is by the use of the hydrophile/lipophile balance (HLB). The nature of the hydrophilic group (also known as the “head”) provides the most useful means for categorizing the different surfactants used in formulations (Rieger, in Pharmaceutical Dosage Forms, Marcel Dekker, Inc., New York, N.Y., 1988, p. 285).

[0635] If the surfactant molecule is not ionized, it is classified as a nonionic surfactant. Nonionic surfactants find wide application in pharmaceutical and cosmetic products and are usable over a wide range of pH values. In general, their HLB values range from 2 to about 18 depending on their structure. Nonionic surfactants include nonionic esters such as ethylene glycol esters, propylene glycol esters, glyceryl esters, polyglyceryl esters, sorbitan esters, sucrose esters, and ethoxylated esters. Nonionic alkanolamides and ethers such as fatty alcohol ethoxylates, propoxylated alcohols, and ethoxylated/propoxylated block polymers are also included in this class. The polyoxyethylene surfactants are the most popular members of the nonionic surfactant class.

[0636] If the surfactant molecule carries a negative charge when it is dissolved or dispersed in water, the surfactant is classified as anionic. Anionic surfactants include carboxylates such as soaps, acyl lactylates, acyl amides of amino acids, esters of sulfuric acid such as alkyl sulfates and ethoxylated alkyl sulfates, sulfonates such as alkyl benzene sulfonates, acyl isethionates, acyl taurates and sulfosuccinates, and phosphates. The most important members of the anionic surfactant class are the alkyl sulfates and the soaps.

[0637] If the surfactant molecule carries a positive charge when it is dissolved or dispersed in water, the surfactant is classified as cationic. Cationic surfactants include quaternary ammonium salts and ethoxylated amines. The quaternary ammonium salts are the most used members of this class.

[0638] If the surfactant molecule has the ability to carry either a positive or negative charge, the surfactant is classified as amphoteric. Amphoteric surfactants include acrylic acid derivatives, substituted alkylamides, N-alkylbetaines and phosphatides.

[0639] The use of surfactants in drug products, formulations and in emulsions has been reviewed (Rieger, in Pharmaceutical Dosage Forms, Marcel Dekker, Inc., New York, N.Y., 1988, p. 285).

[0640] The RNAi agent for use in the methods of the disclosure can also be provided as micellar formulations. “Micelles” are defined herein as a particular type of molecular assembly in which amphipathic molecules are arranged in a spherical structure such that all the hydrophobic portions of the molecules are directed inward, leaving the hydrophilic portions in contact with the surrounding aqueous phase. The converse arrangement exists if the environment is hydrophobic.

[0641] A mixed micellar formulation suitable for delivery through transdermal membranes may be prepared by mixing an aqueous solution of the siRNA composition, an alkali metal C₈ to C₂₂ alkyl sulphate, and a micelle forming compounds. Exemplary micelle forming compounds include lecithin, hyaluronic acid, pharmaceutically acceptable salts of hyaluronic acid, glycolic acid, lactic acid, chamomile extract, cucumber extract, oleic acid, linoleic acid, linolenic acid, monoolein, monooleates, monolaurates, borage oil, evening of primrose oil, menthol, trihydroxy oxo cholanyl glycine and pharmaceutically acceptable salts thereof, glycerin, polyglycerin, lysine, polylysine, triolein, polyoxyethylene ethers and analogues thereof, polidocanol alkyl ethers and analogues thereof, chenodeoxycholate, deoxycholate, and mixtures thereof. The micelle forming compounds may be added at the same time or after addition of the alkali metal alkyl sulphate. Mixed micelles will form with substantially any kind of mixing of the ingredients but vigorous mixing in order to provide smaller size micelles.

[0642] In one method a first micellar composition is prepared which contains the siRNA composition and at least the alkali metal alkyl sulphate. The first micellar composition is then mixed with at least three micelle forming compounds to form a mixed micellar composition. In another method, the micellar composition is prepared by mixing the siRNA composition, the alkali metal alkyl sulphate and at least one of the micelle forming compounds, followed by addition of the remaining micelle forming compounds, with vigorous mixing.

[0643] Phenol or m-cresol may be added to the mixed micellar composition to stabilize the formulation and protect against bacterial growth. Alternatively, phenol or m-cresol may be added with the micelle forming ingredients. An isotonic agent such as glycerin may also be added after formation of the mixed micellar composition.

[0644] For delivery of the micellar formulation as a spray, the formulation can be put into an aerosol dispenser and the dispenser is charged with a propellant. The propellant, which is under pressure, is in liquid form in the dispenser. The ratios of the ingredients are adjusted so that the aqueous and propellant phases become one, i.e., there is one phase. If there are two phases, it is necessary to shake the dispenser prior to dispensing a portion of the contents, e.g., through a metered valve. The dispensed dose of pharmaceutical agent is propelled from the metered valve in a fine spray.

[0645] Propellants may include hydrogen-containing chlorofluorocarbons, hydrogen-containing fluorocarbons, dimethyl ether and diethyl ether. In certain embodiments, HFA 134a (1,1,1,2 tetrafluoroethane) may be used.

[0646] The specific concentrations of the essential ingredients can be determined by relatively straightforward experimentation. For absorption through the oral cavities, it is often desirable to increase, e.g., at least double or triple, the dosage for through injection or administration through the gastrointestinal tract.

### B. Lipid Particles

[0647] RNAi agents, e.g., dsRNAs of in the disclosure may be fully encapsulated in a lipid formulation, e.g., a LNP, or other nucleic acid-lipid particle.

[0648] As used herein, the term “LNP” refers to a stable nucleic acid-lipid particle. LNPs typically contain a cationic lipid, a non-cationic lipid, and a lipid that prevents aggregation of the particle (e.g., a PEG-lipid conjugate). LNPs are extremely useful for systemic applications, as they exhibit extended circulation lifetimes following intravenous (i.v.) injection and accumulate at distal sites (e.g., sites physically separated from the administration site). LNPs include “pSPLP,” which include an encapsulated condensing agent-nucleic acid complex as set forth in WO 00/03683. The particles of the present disclosure typically have a mean diameter of about 50 nm to about 150 nm, more typically about 60 nm to about 130 nm, more typically about 70 nm to about 110 nm, most typically about 70 nm to about 90 nm, and are substantially nontoxic. In addition, the nucleic acids when present in the nucleic acid-lipid particles of the present disclosure are resistant in aqueous solution to degradation with a nuclease. Nucleic acid-lipid particles and their method of preparation are disclosed in, e.g, U.S. Pat. Nos. 5,976,567; 5,981,501; 6,534,484; 6,586,410; 6,815,432; United States Patent Publication No. 2010/0324120 and WO 96/40964.

[0649] In one embodiment, the lipid to drug ratio (mass/mass ratio) (e.g., lipid to dsRNA ratio) will be in the range of from about 1:1 to about 50:1, from about 1:1 to about 25:1, from about 3:1 to about 15:1, from about 4:1 to about 10:1, from about 5:1 to about 9:1, or about 6:1 to about 9:1. Ranges intermediate to the above recited ranges are also contemplated to be part of the disclosure.

[0650] Certain specific LNP formulations for delivery of RNAi agents have been described in the art, including, e.g., “LNP01” formulations as described in, e.g., WO 2008/042973, which is hereby incorporated by reference.

[0651] Additional exemplary lipid-dsRNA formulations are identified in the Table 1 below.

TABLE 1
Exemplary lipid-dsRNA formulations

| | | cationic lipid/non-cationic |
|---|---|---|
| | | lipid/cholesterol/PEG-lipid conjugate |
| | Ionizable/Cationic Lipid | Lipid:siRNA ratio |
| SNALP-1 | 1,2-Dilinolenyloxy-N,N- | DLinDMA/DPPC/Cholesterol/PEG- |
| | dimethylaminopropane (DLinDMA) | CDMA |
| | | (57.1/7.1/34.4/1.4) |
| | | lipid:siRNA ~7:1 |
| 2-XTC | 2,2-Dilinoley1-4-dimethylaminoethyl-[1,3]- | XTC/DPPC/Cholesterol/PEG-CDMA |
| | dioxolane (XTC) | 57.1/7.1/34.4/1.4 |
| | | lipid:siRNA ~7:1 |
| LNP05 | 2,2-Dilinoley1-4-dimethylaminoethyl-[1,3]- | XTC/DSPC/Cholesterol/PEG-DMG |
| | dioxolane (XTC) | 57.5/7.5/31.5/3.5 |
| | | lipid:siRNA ~6:1 |
| LNP06 | 2,2-Dilinoleyl-4-dimethylaminoethyl-[1,3]- | XTC/DSPC/Cholesterol/PEG-DMG |
| | dioxolane (XTC) | 57.5/7.5/31.5/3.5 |
| | | lipid:siRNA ~11:1 |
| LNP07 | 2,2-Dilinoley1-4-dimethylaminoethyl-[1,3]- | XTC/DSPC/Cholesterol/PEG-DMG |
| | dioxolane (XTC) | 60/7.5/31/1.5, |
| | | lipid:siRNA ~6:1 |
| LNP08 | 2,2-Dilinoley1-4-dimethylaminoethyl-[1,3]- | XTC/DSPC/Cholesterol/PEG-DMG |
| | dioxolane (XTC) | 60/7.5/31/1.5, |
| | | lipid:siRNA ~11:1 |
| LNP09 | 2,2-Dilinoleyl-4-dimethylaminoethyl-[1,3]- | XTC/DSPC/Cholesterol/PEG-DMG |
| | dioxolane (XTC) | 50/10/38.5/1.5 |
| | | Lipid:siRNA 10:1 |
| LNP10 | (3aR,5s,6aS)-N,N-dimethyl-2,2- | ALN100/DSPC/Cholesterol/PEG- |
| | di((9Z,12Z)-octadeca-9,12- | DMG |
| | dienyl)tetrahydro-3aH- | 50/10/38.5/1.5 |
| | cyclopenta[d][1,3]dioxol-5-amine | Lipid:siRNA 10:1 |
| | (ALN100) | |
| LNP11 | (6Z,9Z,28Z,31Z)-heptatriaconta-6,9,28,31- | MC-3/DSPC/Cholesterol/PEG-DMG |
| | tetraen-19-y1 4-(dimethylamino)butanoate | 50/10/38.5/1.5 |
| | (MC3) | Lipid:siRNA 10:1 |
| LNP12 | 1,1′-(2-(4-(2-((2-(bis(2- | Tech G1/DSPC/Cholesterol/PEG-DMG |
| | hydroxydodecyl)amino)ethyl)(2- | 50/10/38.5/1.5 |
| | hydroxydodecyl)amino)ethyl)piperazin-1- | Lipid:siRNA 10:1 |
| | yl)ethylazanediyl)didodecan-2-ol (Tech | |
| | G1) | |
| LNP13 | XTC | XTC/DSPC/Chol/PEG-DMG |
| | | 50/10/38.5/1.5 |
| | | Lipid:siRNA: 33:1 |
| LNP14 | MC3 | MC3/DSPC/Chol/PEG-DMG |
| | | 40/15/40/5 |
| | | Lipid:siRNA: 11:1 |
| LNP15 | MC3 | MC3/DSPC/Chol/PEG-DSG/GalNAc- |
| | | PEG-DSG |
| | | 50/10/35/4.5/0.5 |
| | | Lipid:siRNA: 11:1 |
| LNP16 | MC3 | MC3/DSPC/Chol/PEG-DMG |
| | | 50/10/38.5/1.5 |
| | | Lipid:siRNA: 7:1 |
| LNP17 | MC3 | MC3/DSPC/Chol/PEG-DSG |
| | | 50/10/38.5/1.5 |
| | | Lipid:siRNA: 10:1 |
| LNP18 | MC3 | MC3/DSPC/Chol/PEG-DMG |
| | | 50/10/38.5/1.5 |
| | | Lipid:siRNA: 12:1 |
| LNP19 | MC3 | MC3/DSPC/Chol/PEG-DMG |
| | | 50/10/35/5 |
| | | Lipid:siRNA: 8:1 |
| LNP20 | MC3 | MC3/DSPC/Chol/PEG-DPG |
| | | 50/10/38.5/1.5 |
| | | Lipid:siRNA: 10:1 |
| LNP21 | C12-200 | C12-200/DSPC/Chol/PEG-DSG |
| | | 50/10/38.5/1.5 |
| | | Lipid:siRNA: 7:1 |
| LNP22 | XTC | XTC/DSPC/Chol/PEG-DSG |
| | | 50/10/38.5/1.5 |
| | | Lipid:siRNA: 10:1 |

[0652] DSPC: distearoylphosphatidylcholine; DPPC: dipalmitoylphosphatidylcholine; PEG-DMG: PEG-didimyristoyl glycerol (C14-PEG, or PEG-C14) (PEG with avg mol wt of 2000), PEG-DSG: PEG-distyryl glycerol (C18-PEG, or PEG-C18) (PEG with avg mol wt of 2000), PEG-cDMA: PEG-carbamoyl-1,2-dimyristyloxypropylamine (PEG with avg mol wt of 2000) and SNALP (1,2-Dilinolenyloxy-N,N-dimethylaminopropane (DLinDMA)) comprising formulations are described in WO 2009/127060, which is hereby incorporated by reference.

[0653] XTC comprising formulations are described in WO 2010/088537, the entire contents of which are hereby incorporated herein by reference.

[0654] MC3 comprising formulations are described, e.g., in United States Patent Publication No. 2010/0324120, the entire contents of which are hereby incorporated by reference.

[0655] ALNY-100 comprising formulations are described in WO 2010/054406, the entire contents of which are hereby incorporated herein by reference.

[0656] C12-200 comprising formulations are described in WO 2010/129709, the entire contents of which are hereby incorporated herein by reference.

[0657] Compositions and formulations for oral administration include powders or granules, microparticulates, nanoparticulates, suspensions or solutions in water or non-aqueous media, capsules, gel capsules, sachets, tablets or minitablets. Thickeners, flavoring agents, diluents, emulsifiers, dispersing aids or binders can be desirable. In some embodiments, oral formulations are those in which dsRNAs featured in the disclosure are administered in conjunction with one or more penetration enhancer surfactants and chelators. Suitable surfactants include fatty acids or esters or salts thereof, bile acids or salts thereof. Suitable bile acids/salts include chenodeoxycholic acid (CDCA) and ursodeoxychenodeoxycholic acid (UDCA), cholic acid, dehydrocholic acid, deoxycholic acid, glucholic acid, glycholic acid, glycodeoxycholic acid, taurocholic acid, taurodeoxycholic acid, sodium tauro-24,25-dihydro-fusidate and sodium glycodihydrofusidate. Suitable fatty acids include arachidonic acid, undecanoic acid, oleic acid, lauric acid, caprylic acid, capric acid, myristic acid, palmitic acid, stearic acid, linoleic acid, linolenic acid, dicaprate, tricaprate, monoolein, dilaurin, glyceryl 1-monocaprate, 1-dodecylazacycloheptan-2-one, an acylcamitine, an acylcholine, or a monoglyceride, a diglyceride or a pharmaceutically acceptable salt thereof (e.g., sodium). In some embodiments, combinations of penetration enhancers are used, for example, fatty acids/salts in combination with bile acids/salts. One exemplary combination is the sodium salt of lauric acid, capric acid and UDCA. Further penetration enhancers include polyoxyethylene-9-lauryl ether, polyoxyethylene-20-cetyl ether. DsRNAs featured in the disclosure can be delivered orally, in granular form including sprayed dried particles, or complexed to form micro or nanoparticles. DsRNA complexing agents include poly-amino acids; polyimines; polyacrylates; polyalkylacrylates, polyoxethanes, polyalkylcyanoacrylates; cationized gelatins, albumins, starches, acrylates, polyethyleneglycols (PEG) and starches; polyalkylcyanoacrylates; DEAE-derivatized polyimines, pollulans, celluloses and starches. Suitable complexing agents include chitosan, N-trimethylchitosan, poly-L-lysine, polyhistidine, polyornithine, polyspermines, protamine, polyvinylpyridine, polythiodiethylaminomethylethylene P(TDAE), polyaminostyrene (e.g., p-amino), poly(methylcyanoacrylate), poly(ethylcyanoacrylate), poly(butylcyanoacrylate), poly(isobutylcyanoacrylate), poly(isohexylcynaoacrylate), DEAE-methacrylate, DEAE-hexylacrylate, DEAE-acrylamide, DEAE-albumin and DEAE-dextran, polymethylacrylate, polyhexylacrylate, poly(D,L-lactic acid), poly(DL-lactic-co-glycolic acid (PLGA), alginate, and polyethyleneglycol (PEG). Oral formulations for dsRNAs and their preparation are described in detail in U.S. Pat. No. 6,887,906, U.S. 2003/0027780, and U.S. Pat. No. 6,747,014, each of which is incorporated herein by reference.

[0658] Compositions and formulations for parenteral, intraparenchymal (into the brain), intrathecal, intraventricular or intrahepatic administration can include sterile aqueous solutions which can also contain buffers, diluents and other suitable additives such as, but not limited to, penetration enhancers, carrier compounds and other pharmaceutically acceptable carriers or excipients.

[0659] Pharmaceutical compositions of the present disclosure include, but are not limited to, solutions, emulsions, and liposome-containing formulations. These compositions can be generated from a variety of components that include, but are not limited to, preformed liquids, self-emulsifying solids and self-emulsifying semisolids. Particularly preferred are formulations that target the brain when treating 4R-tau-associated diseases or disorders.

[0660] The pharmaceutical formulations of the present disclosure, which can conveniently be presented in unit dosage form, can be prepared according to conventional techniques well known in the pharmaceutical industry. Such techniques include the step of bringing into association the active ingredients with the pharmaceutical carrier(s) or excipient(s). In general, the formulations are prepared by uniformly and intimately bringing into association the active ingredients with liquid carriers or finely divided solid carriers or both, and then, if necessary, shaping the product.

[0661] The compositions of the present disclosure can be formulated into any of many possible dosage forms such as, but not limited to, tablets, capsules, gel capsules, liquid syrups, soft gels, suppositories, and enemas. The compositions of the present disclosure can also be formulated as suspensions in aqueous, non-aqueous or mixed media. Aqueous suspensions can further contain substances which increase the viscosity of the suspension including, for example, sodium carboxymethylcellulose, sorbitol or dextran. The suspension can also contain stabilizers.

### C. Additional Formulations

i. Emulsions

[0662] The compositions of the present disclosure can be prepared and formulated as emulsions. Emulsions are typically heterogeneous systems of one liquid dispersed in another in the form of droplets usually exceeding 0.1 μm in diameter (see e.g., Ansel's Pharmaceutical Dosage Forms and Drug Delivery Systems, Allen, L V., Popovich N G., and Ansel H C., 2004, Lippincott Williams & Wilkins (8th ed.), New York, NY; Idson, in Pharmaceutical Dosage Forms, Lieberman, Rieger and Banker (Eds.), 1988, Marcel Dekker, Inc., New York, N.Y., volume 1, p. 199; Rosoff, in Pharmaceutical Dosage Forms, Lieberman, Rieger and Banker (Eds.), 1988, Marcel Dekker, Inc., New York, N.Y., Volume 1, p. 245; Block in Pharmaceutical Dosage Forms, Lieberman, Rieger and Banker (Eds.), 1988, Marcel Dekker, Inc., New York, N.Y., volume 2, p. 335; Higuchi et al., in Remington's Pharmaceutical Sciences, Mack Publishing Co., Easton, Pa., 1985, p. 301). Emulsions are often biphasic systems comprising two immiscible liquid phases intimately mixed and dispersed with each other. In general, emulsions can be of either the water-in-oil (w/o) or the oil-in-water (o/w) variety. When an aqueous phase is finely divided into and dispersed as minute droplets into a bulk oily phase, the resulting composition is called a water-in-oil (w/o) emulsion. Alternatively, when an oily phase is finely divided into and dispersed as minute droplets into a bulk aqueous phase, the resulting composition is called an oil-in-water (o/w) emulsion. Emulsions can contain additional components in addition to the dispersed phases, and the active drug which can be present as a solution in either aqueous phase, oily phase or itself as a separate phase. Pharmaceutical excipients such as emulsifiers, stabilizers, dyes, and anti-oxidants can also be present in emulsions as needed. Pharmaceutical emulsions can also be multiple emulsions that are comprised of more than two phases such as, for example, in the case of oil-in-water-in-oil (o/w/o) and water-in-oil-in-water (w/o/w) emulsions. Such complex formulations often provide certain advantages that simple binary emulsions do not. Multiple emulsions in which individual oil droplets of an o/w emulsion enclose small water droplets constitute a w/o/w emulsion. Likewise, a system of oil droplets enclosed in globules of water stabilized in an oily continuous phase provides an o/w/o emulsion.

[0663] Emulsions are characterized by little or no thermodynamic stability. Often, the dispersed or discontinuous phase of the emulsion is well dispersed into the external or continuous phase and maintained in this form through the means of emulsifiers or the viscosity of the formulation. Either of the phases of the emulsion can be a semisolid or a solid, as is the case of emulsion-style ointment bases and creams. Other means of stabilizing emulsions entail the use of emulsifiers that can be incorporated into either phase of the emulsion. Emulsifiers can broadly be classified into four categories: synthetic surfactants, naturally occurring emulsifiers, absorption bases, and finely dispersed solids (see e.g., Ansel's Pharmaceutical Dosage Forms and Drug Delivery Systems, Allen, L V., Popovich N G., and Ansel H C., 2004, Lippincott Williams & Wilkins (8th ed.), New York, NY; Idson, in Pharmaceutical Dosage Forms, Lieberman, Rieger and Banker (Eds.), 1988, Marcel Dekker, Inc., New York, N.Y., volume 1, p. 199).

[0664] Synthetic surfactants, also known as surface active agents, have found wide applicability in the formulation of emulsions and have been reviewed in the literature (see e.g., Ansel's Pharmaceutical Dosage Forms and Drug Delivery Systems, Allen, L V., Popovich N G., and Ansel H C., 2004, Lippincott Williams & Wilkins (8th ed.), New York, NY; Rieger, in Pharmaceutical Dosage Forms, Lieberman, Rieger and Banker (Eds.), 1988, Marcel Dekker, Inc., New York, N.Y., volume 1, p. 285; Idson, in Pharmaceutical Dosage Forms, Lieberman, Rieger and Banker (Eds.), Marcel Dekker, Inc., New York, N.Y., 1988, volume 1, p. 199). Surfactants are typically amphiphilic and comprise a hydrophilic and a hydrophobic portion. The ratio of the hydrophilic to the hydrophobic nature of the surfactant has been termed the hydrophile/lipophile balance (HLB) and is a valuable tool in categorizing and selecting surfactants in the preparation of formulations. Surfactants can be classified into different classes based on the nature of the hydrophilic group: nonionic, anionic, cationic and amphoteric (see e.g., Ansel's Pharmaceutical Dosage Forms and Drug Delivery Systems, Allen, L V., Popovich N G., and Ansel H C., 2004, Lippincott Williams & Wilkins (8th ed.), New York, NY Rieger, in Pharmaceutical Dosage Forms, Lieberman, Rieger and Banker (Eds.), 1988, Marcel Dekker, Inc., New York, N.Y., volume 1, p. 285).

[0665] Naturally occurring emulsifiers used in emulsion formulations include lanolin, beeswax, phosphatides, lecithin and acacia. Absorption bases possess hydrophilic properties such that they can soak up water to form w/o emulsions yet retain their semisolid consistencies, such as anhydrous lanolin and hydrophilic petrolatum. Finely divided solids have also been used as good emulsifiers especially in combination with surfactants and in viscous preparations. These include polar inorganic solids, such as heavy metal hydroxides, nonswelling clays such as bentonite, attapulgite, hectorite, kaolin, montmorillonite, colloidal aluminum silicate and colloidal magnesium aluminum silicate, pigments and nonpolar solids such as carbon or glyceryl tristearate.

[0666] A large variety of non-emulsifying materials are also included in emulsion formulations and contribute to the properties of emulsions. These include fats, oils, waxes, fatty acids, fatty alcohols, fatty esters, humectants, hydrophilic colloids, preservatives and antioxidants (Block, in Pharmaceutical Dosage Forms, Lieberman, Rieger and Banker (Eds.), 1988, Marcel Dekker, Inc., New York, N.Y., volume 1, p. 335; Idson, in Pharmaceutical Dosage Forms, Lieberman, Rieger and Banker (Eds.), 1988, Marcel Dekker, Inc., New York, N.Y., volume 1, p. 199).

[0667] Hydrophilic colloids or hydrocolloids include naturally occurring gums and synthetic polymers such as polysaccharides (for example, acacia, agar, alginic acid, carrageenan, guar gum, karaya gum, and tragacanth), cellulose derivatives (for example, carboxymethylcellulose and carboxypropylcellulose), and synthetic polymers (for example, carbomers, cellulose ethers, and carboxyvinyl polymers). These disperse or swell in water to form colloidal solutions that stabilize emulsions by forming strong interfacial films around the dispersed-phase droplets and by increasing the viscosity of the external phase.

[0668] Since emulsions often contain a number of ingredients such as carbohydrates, proteins, sterols and phosphatides that can readily support the growth of microbes, these formulations often incorporate preservatives. Commonly used preservatives included in emulsion formulations include methyl paraben, propyl paraben, quaternary ammonium salts, benzalkonium chloride, esters of p-hydroxybenzoic acid, and boric acid. Antioxidants are also commonly added to emulsion formulations to prevent deterioration of the formulation. Antioxidants used can be free radical scavengers such as tocopherols, alkyl gallates, butylated hydroxyanisole, butylated hydroxytoluene, or reducing agents such as ascorbic acid and sodium metabisulfite, and antioxidant synergists such as citric acid, tartaric acid, and lecithin.

[0669] The application of emulsion formulations via dermatological, oral and parenteral routes and methods for their manufacture have been reviewed in the literature (see e.g., Ansel's Pharmaceutical Dosage Forms and Drug Delivery Systems, Allen, L V., Popovich N G., and Ansel H C., 2004, Lippincott Williams & Wilkins (8th ed.), New York, NY; Idson, in Pharmaceutical Dosage Forms, Lieberman, Rieger and Banker (Eds.), 1988, Marcel Dekker, Inc., New York, N.Y., volume 1, p. 199). Emulsion formulations for oral delivery have been very widely used because of ease of formulation, as well as efficacy from an absorption and bioavailability standpoint (see e.g., Ansel's Pharmaceutical Dosage Forms and Drug Delivery Systems, Allen, L V., Popovich N G., and Ansel H C., 2004, Lippincott Williams & Wilkins (8th ed.), New York, NY; Rosoff, in Pharmaceutical Dosage Forms, Lieberman, Rieger and Banker (Eds.), 1988, Marcel Dekker, Inc., New York, N.Y., volume 1, p. 245; Idson, in Pharmaceutical Dosage Forms, Lieberman, Rieger and Banker (Eds.), 1988, Marcel Dekker, Inc., New York, N.Y., volume 1, p. 199). Mineral-oil base laxatives, oil-soluble vitamins and high fat nutritive preparations are among the materials that have commonly been administered orally as o/w emulsions.

ii. Microemulsions

[0670] In one embodiment of the present disclosure, the compositions of RNAi agents and nucleic acids are formulated as microemulsions. A microemulsion can be defined as a system of water, oil and amphiphile which is a single optically isotropic and thermodynamically stable liquid solution (see e.g., Ansel's Pharmaceutical Dosage Forms and Drug Delivery Systems, Allen, L V., Popovich N G., and Ansel H C., 2004, Lippincott Williams & Wilkins (8th ed.), New York, NY; Rosoff, in Pharmaceutical Dosage Forms, Lieberman, Rieger and Banker (Eds.), 1988, Marcel Dekker, Inc., New York, N.Y., volume 1, p. 245). Typically, microemulsions are systems that are prepared by first dispersing an oil in an aqueous surfactant solution and then adding a sufficient amount of a fourth component, generally an intermediate chain-length alcohol to form a transparent system. Therefore, microemulsions have also been described as thermodynamically stable, isotropically clear dispersions of two immiscible liquids that are stabilized by interfacial films of surface-active molecules (Leung and Shah, in: Controlled Release of Drugs: Polymers and Aggregate Systems, Rosoff, M., Ed., 1989, VCH Publishers, New York, pages 185-215). Microemulsions commonly are prepared via a combination of three to five components that include oil, water, surfactant, cosurfactant and electrolyte. Whether the microemulsion is of the water-in-oil (w/o) or an oil-in-water (o/w) type is dependent on the properties of the oil and surfactant used, and on the structure and geometric packing of the polar heads and hydrocarbon tails of the surfactant molecules (Schott, in Remington's Pharmaceutical Sciences, Mack Publishing Co., Easton, Pa., 1985, p. 271).

[0671] The phenomenological approach utilizing phase diagrams has been extensively studied and has yielded a comprehensive knowledge, to one skilled in the art, of how to formulate microemulsions (see e.g., Ansel's Pharmaceutical Dosage Forms and Drug Delivery Systems, Allen, L V., Popovich N G., and Ansel H C., 2004, Lippincott Williams & Wilkins (8th ed.), New York, NY; Rosoff, in Pharmaceutical Dosage Forms, Lieberman, Rieger and Banker (Eds.), 1988, Marcel Dekker, Inc., New York, N.Y., volume 1, p. 245; Block, in Pharmaceutical Dosage Forms, Lieberman, Rieger and Banker (Eds.), 1988, Marcel Dekker, Inc., New York, N.Y., volume 1, p. 335). Compared to conventional emulsions, microemulsions offer the advantage of solubilizing water-insoluble drugs in a formulation of thermodynamically stable droplets that are formed spontaneously.

[0672] Surfactants used in the preparation of microemulsions include, but are not limited to, ionic surfactants, non-ionic surfactants, Brij 96, polyoxyethylene oleyl ethers, polyglycerol fatty acid esters, tetraglycerol monolaurate (ML310), tetraglycerol monooleate (M0310), hexaglycerol monooleate (P0310), hexaglycerol pentaoleate (P0500), decaglycerol monocaprate (MCA750), decaglycerol monooleate (M0750), decaglycerol sequioleate (S0750), decaglycerol decaoleate (DA0750), alone or in combination with cosurfactants. The cosurfactant, usually a short-chain alcohol such as ethanol, 1-propanol, and 1-butanol, serves to increase the interfacial fluidity by penetrating into the surfactant film and consequently creating a disordered film because of the void space generated among surfactant molecules. Microemulsions can, however, be prepared without the use of cosurfactants and alcohol-free self-emulsifying microemulsion systems are known in the art. The aqueous phase can typically be, but is not limited to, water, an aqueous solution of the drug, glycerol, PEG300, PEG400, polyglycerols, propylene glycols, and derivatives of ethylene glycol. The oil phase can include, but is not limited to, materials such as Captex 300, Captex 355, Capmul MCM, fatty acid esters, medium chain (C8-C12) mono, di, and tri-glycerides, polyoxyethylated glyceryl fatty acid esters, fatty alcohols, polyglycolized glycerides, saturated polyglycolized C8-C10 glycerides, vegetable oils and silicone oil.

[0673] Microemulsions are particularly of interest from the standpoint of drug solubilization and the enhanced absorption of drugs. Lipid based microemulsions (both o/w and w/o) have been proposed to enhance the oral bioavailability of drugs, including peptides (see e.g., U.S. Pat. Nos. 6,191,105; 7,063,860; 7,070,802; 7,157,099; Constantinides et al., Pharmaceutical Research, 1994, 11, 1385-1390; Ritschel, Meth. Find. Exp. Clin. Pharmacol., 1993, 13, 205). Microemulsions afford advantages of improved drug solubilization, protection of drug from enzymatic hydrolysis, possible enhancement of drug absorption due to surfactant-induced alterations in membrane fluidity and permeability, ease of preparation, ease of oral administration over solid dosage forms, improved clinical potency, and decreased toxicity (see e.g., U.S. Pat. Nos. 6,191,105; 7,063,860; 7,070,802; 7,157,099; Constantinides et al., Pharmaceutical Research, 1994, 11, 1385; Ho et al., J. Pharm. Sci., 1996, 85, 138-143). Often microemulsions can form spontaneously when their components are brought together at ambient temperature. This can be particularly advantageous when formulating thermolabile drugs, peptides or RNAi agents. Microemulsions have also been effective in the transdermal delivery of active components in both cosmetic and pharmaceutical applications. It is expected that the microemulsion compositions and formulations of the present disclosure will facilitate the increased systemic absorption of RNAi agents and nucleic acids from the gastrointestinal tract, as well as improve the local cellular uptake of RNAi agents and nucleic acids.

[0674] Microemulsions of the present disclosure can also contain additional components and additives such as sorbitan monostearate (Grill 3), Labrasol, and penetration enhancers to improve the properties of the formulation and to enhance the absorption of the RNAi agents and nucleic acids of the present disclosure. Penetration enhancers used in the microemulsions of the present disclosure can be classified as belonging to one of five broad categories—surfactants, fatty acids, bile salts, chelating agents, and non-chelating non-surfactants (Lee et al., Critical Reviews in Therapeutic Drug Carrier Systems, 1991, p. 92). Each of these classes has been discussed above.

iii. Microparticles

[0675] An RNAi agent of the disclosure may be incorporated into a particle, e.g., a microparticle. Microparticles can be produced by spray-drying, but may also be produced by other methods including lyophilization, evaporation, fluid bed drying, vacuum drying, or a combination of these techniques.

iv. Penetration Enhancers

[0676] In one embodiment, the present disclosure employs various penetration enhancers to effect the efficient delivery of nucleic acids, particularly RNAi agents, to the skin of animals. Most drugs are present in solution in both ionized and nonionized forms. However, usually only lipid soluble or lipophilic drugs readily cross cell membranes. It has been discovered that even non-lipophilic drugs can cross cell membranes if the membrane to be crossed is treated with a penetration enhancer. In addition to aiding the diffusion of non-lipophilic drugs across cell membranes, penetration enhancers also enhance the permeability of lipophilic drugs.

[0677] Penetration enhancers can be classified as belonging to one of five broad categories, i.e., surfactants, fatty acids, bile salts, chelating agents, and non-chelating non-surfactants (see e.g., Malmsten, M. Surfactants and polymers in drug delivery, Informa Health Care, New York, NY, 2002; Lee et al., Critical Reviews in Therapeutic Drug Carrier Systems, 1991, p. 92). Each of the above mentioned classes of penetration enhancers are described below in greater detail.

[0678] Surfactants (or “surface-active agents”) are chemical entities which, when dissolved in an aqueous solution, reduce the surface tension of the solution or the interfacial tension between the aqueous solution and another liquid, with the result that absorption of RNAi agents through the mucosa is enhanced. In addition to bile salts and fatty acids, these penetration enhancers include, for example, sodium lauryl sulfate, polyoxyethylene-9-lauryl ether and polyoxyethylene-20-cetyl ether) (see e.g., Malmsten, M. Surfactants and polymers in drug delivery, Informa Health Care, New York, NY, 2002; Lee et al., Critical Reviews in Therapeutic Drug Carrier Systems, 1991, p. 92); and perfluorochemical emulsions, such as FC-43. Takahashi et al., J. Pharm. Pharmacol., 1988, 40, 252).

[0679] Various fatty acids and their derivatives which act as penetration enhancers include, for example, oleic acid, lauric acid, capric acid (n-decanoic acid), myristic acid, palmitic acid, stearic acid, linoleic acid, linolenic acid, dicaprate, tricaprate, monoolein (1-monooleoyl-rac-glycerol), dilaurin, caprylic acid, arachidonic acid, glycerol 1-monocaprate, 1-dodecylazacycloheptan-2-one, acylcarnitines, acylcholines, C₁₋₂₀ alkyl esters thereof (e.g., methyl, isopropyl and t-butyl), and mono- and di-glycerides thereof (i.e., oleate, laurate, caprate, myristate, palmitate, stearate, linoleate, etc.) (see e.g., Touitou, E., et al. Enhancement in Drug Delivery, CRC Press, Danvers, MA, 2006; Lee et al., Critical Reviews in Therapeutic Drug Carrier Systems, 1991, p. 92; Muranishi, Critical Reviews in Therapeutic Drug Carrier Systems, 1990, 7, 1-33; E1 Hariri et al., J. Pharm. Pharmacol., 1992, 44, 651-654).

[0680] The physiological role of bile includes the facilitation of dispersion and absorption of lipids and fat-soluble vitamins (see e.g., Malmsten, M. Surfactants and polymers in drug delivery, Informa Health Care, New York, NY, 2002; Brunton, Chapter 38 in: Goodman & Gilman's The Pharmacological Basis of Therapeutics, 9th Ed., Hardman et al. Eds., McGraw-Hill, New York, 1996, pp. 934-935). Various natural bile salts, and their synthetic derivatives, act as penetration enhancers. Thus the term “bile salts” includes any of the naturally occurring components of bile as well as any of their synthetic derivatives. Suitable bile salts include, for example, cholic acid (or its pharmaceutically acceptable sodium salt, sodium cholate), dehydrocholic acid (sodium dehydrocholate), deoxycholic acid (sodium deoxycholate), glucholic acid (sodium glucholate), glycholic acid (sodium glycocholate), glycodeoxycholic acid (sodium glycodeoxycholate), taurocholic acid (sodium taurocholate), taurodeoxycholic acid (sodium taurodeoxycholate), chenodeoxycholic acid (sodium chenodeoxycholate), ursodeoxycholic acid (UDCA), sodium tauro-24,25-dihydro-fusidate (STDHF), sodium glycodihydrofusidate and polyoxyethylene-9-lauryl ether (POE) (see e.g., Malmsten, M. Surfactants and polymers in drug delivery, Informa Health Care, New York, NY, 2002; Lee et al., Critical Reviews in Therapeutic Drug Carrier Systems, 1991, page 92; Swinyard, Chapter 39 In: Remington's Pharmaceutical Sciences, 18th Ed., Gennaro, ed., Mack Publishing Co., Easton, Pa., 1990, pages 782-783; Muranishi, Critical Reviews in Therapeutic Drug Carrier Systems, 1990, 7, 1-33; Yamamoto et al., J. Pharm. Exp. Ther., 1992, 263, 25; Yamashita et al., J. Pharm. Sci., 1990, 79, 579-583).

[0681] Chelating agents, as used in connection with the present disclosure, can be defined as compounds that remove metallic ions from solution by forming complexes therewith, with the result that absorption of RNAi agents through the mucosa is enhanced. With regards to their use as penetration enhancers in the present disclosure, chelating agents have the added advantage of also serving as DNase inhibitors, as most characterized DNA nucleases require a divalent metal ion for catalysis and are thus inhibited by chelating agents (Jarrett, J. Chromatogr., 1993, 618, 315-339). Suitable chelating agents include but are not limited to disodium ethylenediaminetetraacetate (EDTA), citric acid, salicylates (e.g., sodium salicylate, 5-methoxysalicylate and homovanilate), N-acyl derivatives of collagen, laureth-9 and N-amino acyl derivatives of beta-diketones (enamines)(see e.g., Katdare, A. et al., Excipient development for pharmaceutical, biotechnology, and drug delivery, CRC Press, Danvers, MA, 2006; Lee et al., Critical Reviews in Therapeutic Drug Carrier Systems, 1991, page 92; Muranishi, Critical Reviews in Therapeutic Drug Carrier Systems, 1990, 7, 1-33; Buur et al., J. Control Rel., 1990, 14, 43-51).

[0682] As used herein, non-chelating non-surfactant penetration enhancing compounds can be defined as compounds that demonstrate insignificant activity as chelating agents or as surfactants but that nonetheless enhance absorption of RNAi agents through the alimentary mucosa (see e.g., Muranishi, Critical Reviews in Therapeutic Drug Carrier Systems, 1990, 7, 1-33). This class of penetration enhancers includes, for example, unsaturated cyclic ureas, 1-alkyl- and 1-alkenylazacyclo-alkanone derivatives (Lee et al., Critical Reviews in Therapeutic Drug Carrier Systems, 1991, page 92); and non-steroidal anti-inflammatory agents such as diclofenac sodium, indomethacin and phenylbutazone (Yamashita et al., J. Pharm. Pharmacol., 1987, 39, 621-626).

[0683] Agents that enhance uptake of RNAi agents at the cellular level can also be added to the pharmaceutical and other compositions of the present disclosure. For example, cationic lipids, such as lipofectin (Junichi et al, U.S. Pat. No. 5,705,188), cationic glycerol derivatives, and polycationic molecules, such as polylysine (WO 97/30731), are also known to enhance the cellular uptake of dsRNAs.

[0684] Other agents can be utilized to enhance the penetration of the administered nucleic acids, including glycols such as ethylene glycol and propylene glycol, pyrrols such as 2-pyrrol, azones, and terpenes such as limonene and menthone.

v. Excipients

[0685] In contrast to a carrier compound, a “pharmaceutical carrier” or “excipient” is a pharmaceutically acceptable solvent, suspending agent or any other pharmacologically inert vehicle for delivering one or more nucleic acids to an animal. The excipient can be liquid or solid and is selected, with the planned manner of administration in mind, so as to provide for the desired bulk, consistency, etc., when combined with a nucleic acid and the other components of a given pharmaceutical composition. Typical pharmaceutical carriers include, but are not limited to, binding agents (e.g., pregelatinized maize starch, polyvinylpyrrolidone or hydroxypropyl methylcellulose, etc.); fillers (e.g., lactose and other sugars, microcrystalline cellulose, pectin, gelatin, calcium sulfate, ethyl cellulose, polyacrylates or calcium hydrogen phosphate, etc.); lubricants (e.g., magnesium stearate, talc, silica, colloidal silicon dioxide, stearic acid, metallic stearates, hydrogenated vegetable oils, corn starch, polyethylene glycols, sodium benzoate, sodium acetate, etc.); disintegrants (e.g., starch, sodium starch glycolate, etc.); and wetting agents (e.g., sodium lauryl sulphate, etc).

[0686] Pharmaceutically acceptable organic or inorganic excipients suitable for non-parenteral administration which do not deleteriously react with nucleic acids can also be used to formulate the compositions of the present disclosure. Suitable pharmaceutically acceptable carriers include, but are not limited to, water, salt solutions, alcohols, polyethylene glycols, gelatin, lactose, amylose, magnesium stearate, talc, silicic acid, viscous paraffin, hydroxymethylcellulose, polyvinylpyrrolidone and the like.

[0687] Formulations for topical administration of nucleic acids can include sterile and non-sterile aqueous solutions, non-aqueous solutions in common solvents such as alcohols, or solutions of the nucleic acids in liquid or solid oil bases. The solutions can also contain buffers, diluents and other suitable additives. Pharmaceutically acceptable organic or inorganic excipients suitable for non-parenteral administration which do not deleteriously react with nucleic acids can be used.

[0688] Suitable pharmaceutically acceptable excipients include, but are not limited to, water, salt solutions, alcohol, polyethylene glycols, gelatin, lactose, amylose, magnesium stearate, talc, silicic acid, viscous paraffin, hydroxymethylcellulose, polyvinylpyrrolidone and the like.

vi. Other Components

[0689] The compositions of the present disclosure can additionally contain other adjunct components conventionally found in pharmaceutical compositions, at their art-established usage levels. Thus, for example, the compositions can contain additional, compatible, pharmaceutically-active materials such as, for example, antipruritics, astringents, local anesthetics or anti-inflammatory agents, or can contain additional materials useful in physically formulating various dosage forms of the compositions of the present disclosure, such as dyes, flavoring agents, preservatives, antioxidants, opacifiers, thickening agents and stabilizers. However, such materials, when added, should not unduly interfere with the biological activities of the components of the compositions of the present disclosure. The formulations can be sterilized and, if desired, mixed with auxiliary agents, e.g., lubricants, preservatives, stabilizers, wetting agents, emulsifiers, salts for influencing osmotic pressure, buffers, colorings, flavorings or aromatic substances and the like which do not deleteriously interact with the nucleic acid(s) of the formulation.

[0690] Aqueous suspensions can contain substances which increase the viscosity of the suspension including, for example, sodium carboxymethylcellulose, sorbitol or dextran. The suspension can also contain stabilizers.

[0691] In some embodiments, pharmaceutical compositions featured in the disclosure include (a) one or more RNAi agents and (b) one or more agents which function by a non-RNAi mechanism and which are useful in treating a 4R-tau-associated disorder. Examples of such agents include, but are not limited to, cholinesterase inhibitors, memantine, monoamine inhibitors, reserpine, anticonvulsants, antipsychotic agents, and antidepressants.

[0692] Toxicity and therapeutic efficacy of such compounds can be determined by standard pharmaceutical procedures in cell cultures or experimental animals, e.g., for determining the LD₅₀ (the dose lethal to 50% of the population) and the ED₅₀(the dose therapeutically effective in 50% of the population). The dose ratio between toxic and therapeutic effects is the therapeutic index and it can be expressed as the ratio LD₅₀/ED₅₀. Compounds that exhibit high therapeutic indices are preferred.

[0693] The data obtained from cell culture assays and animal studies can be used in formulating a range of dosage for use in humans. The dosage of compositions featured herein in the disclosure lies generally within a range of circulating concentrations that include the ED₅₀ with little or no toxicity. The dosage can vary within this range depending upon the dosage form employed and the route of administration utilized. For any compound used in the methods featured in the disclosure, the therapeutically effective dose can be estimated initially from cell culture assays. A dose can be formulated in animal models to achieve a circulating plasma concentration range of the compound or, when appropriate, of the polypeptide product of a target sequence (e.g., achieving a decreased concentration of the polypeptide) that includes the IC₅₀ (i.e., the concentration of the test compound which achieves a half-maximal inhibition of symptoms) as determined in cell culture. Such information can be used to more accurately determine useful doses in humans. Levels in plasma can be measured, for example, by high performance liquid chromatography.

[0694] In addition to their administration, as discussed above, the RNAi agents featured in the disclosure can be administered in combination with other known agents effective in treatment of clinical symptoms processes related to the aberrant expression of 4R-tau.

[0695] Such co-administrations may be separately or simultaneously. For example, in the treatment of a 4R-tauopathy, an RNAi agent featured in the disclosure may be administered in combination with an antioxidant such as CoQ10 (e.g., Ubidecarenon; an O-linked N-acetylglucosamine glycoside hydrolase (OGA) inhibitor such as ASN120290 (ASN-561), MK-8719, or LY3372689; a Tau aggregation inhibitor (TAI) such as AZP2006, methylthioninium chloride (TRx0237), or leuco-methylthioninium bis(hydromethanesulfonate (LMTM); a Tau N-term monoclonal antibody such as BIIB092 (gosuranemab, BMS-986168, IPN007) or ABBV-8E12 (C2N 8E12, tilavonemab); a Tau mid-domain monoclonal antibody such as UCB 0107; specificity protein 1 (Sp1) degradation promoter such as tolfenamic acid (NT101); an antisense oligonucleotide such as NI0752 or BIIB080; or a mixture thereof.

[0696] In any event, the administering physician can adjust the amount and timing of RNAi agent administration on the basis of results observed using standard measures of efficacy known in the art or described herein.

### VII. Kits

[0697] In certain aspects, the instant disclosure provides kits that include a suitable container containing a pharmaceutical formulation of a siRNA compound, e.g., a double-stranded siRNA compound, or ssiRNA compound, (e.g., a precursor, e.g., a larger siRNA compound which can be processed into a ssiRNA compound, or a DNA which encodes an siRNA compound, e.g., a double-stranded siRNA compound, or ssiRNA compound, or precursor thereof).

[0698] Such kits include one or more dsRNA agent(s) and instructions for use, e.g., instructions for administering a prophylactically or therapeutically effective amount of a dsRNA agent(s). The dsRNA agent may be in a vial or a pre-filled syringe. The kits may optionally further comprise means for administering the dsRNA agent (e.g., an injection device, such as a pre-filled syringe or an intrathecal pump), or means for measuring the inhibition of 4R-tau (e.g., means for measuring the inhibition of MAPT mRNA encoding 4R-tau, 4R-tau, and/or 4R-tau activity). Such means for measuring the inhibition of 4R-tau may comprise a means for obtaining a sample from a subject, such as, e.g., a CSF and/or plasma sample. The kits of the disclosure may optionally further comprise means for determining the therapeutically effective or prophylactically effective amount.

[0699] In certain embodiments the individual components of the pharmaceutical formulation may be provided in one container. Alternatively, it may be desirable to provide the components of the pharmaceutical formulation separately in two or more containers, e.g., one container for a siRNA compound preparation, and at least another for a carrier compound. The kit may be packaged in a number of different configurations such as one or more containers in a single box. The different components can be combined, e.g., according to instructions provided with the kit. The components can be combined according to a method described herein, e.g., to prepare and administer a pharmaceutical composition. The kit can also include a delivery device.

### VIII. Methods for Inhibiting 4R-Tau Expression

[0700] The present disclosure also provides methods of inhibiting expression of 4R-tau in a cell. The methods include contacting a cell with an RNAi agent, e.g., double stranded RNAi agent, in an amount effective to inhibit expression and/or activity of 4R-tau in the cell, thereby inhibiting expression and/or activity of 4R-tau in the cell. The present disclosure also provides methods of reducing abberant expression of exon 10-containing MAPT transcripts in a cell. The methods include contacting the cell with a dsRNA agent of the present disclosure, or a pharmaceutical composition of the present disclosure, thereby degrading exon 10-containing MAPT transcripts in the cell. The dsRNA agents of the present disclosure may be used by the methods described herein to preferentially inhibit the expression and/or activity of 4R-tau, with respect to the inhibition of 3R-tau. In certain embodiments, the cell is within a subject. In certain embodiments, the subject is a human. In certain embodiments, the subject has a 4R-tau-associated disorder. In certain embodiments, the 4R-tau-associated disorder is a neuro-degenerative disorder. In certain embodiments, the neurodegenerative disorder is associated with an abnormality of MAPT gene encoded protein 4R-tau. In certain embodiments, the abnormality of MAPT gene encoded protein 4R-tau results in aggregation of 4R-tau in the subject's brain.

[0701] In certain embodiments of the disclosure, 4R-tau expression and/or activity is inhibited by at least 30%, preferentially in CNS (e.g., brain) cells. In specific embodiments, 4R-tau expression and/or activity is inhibited by at least 30%. In certain embodiments, 4R-tau protein level in serum of the subject is inhibited by at least 30%. In certain other embodiments of the disclosure, 4R-tau expression and/or activity is inhibited by at least 30%, preferentially in hepatocytes.

[0702] Contacting of a cell with an RNAi agent, e.g., a double stranded RNAi agent, may be done in vitro or in vivo. Contacting a cell in vivo with the RNAi agent includes contacting a cell or group of cells within a subject, e.g., a human subject, with the RNAi agent. Combinations of in vitro and in vivo methods of contacting a cell are also possible.

[0703] Contacting a cell may be direct or indirect, as discussed above. Furthermore, contacting a cell may be accomplished via a targeting ligand, including any ligand described herein or known in the art. In some embodiments, the targeting ligand is a carbohydrate moiety, e.g., a GalNAc ligand, or any other ligand that directs the RNAi agent to a site of interest.

[0704] The term “inhibiting,” as used herein, is used interchangeably with “reducing,” “silencing,” “downregulating,” “suppressing” and other similar terms, and includes any level of inhibition. In certain embodiments, a level of inhibition, e.g., for an RNAi agent of the instant disclosure, can be assessed in cell culture conditions, e.g., wherein cells in cell culture are transfected via LIPOFECTAMINE™-mediated transfection at a concentration in the vicinity of a cell of 10 nM or less, 1 nM or less, etc. Knockdown of a given RNAi agent can be determined via comparison of pre-treated levels in cell culture versus post-treated levels in cell culture, optionally also comparing against cells treated in parallel with a scrambled or other form of control RNAi agent. For example, knockdown of 4R-tau by exon 10-targeting agents may be compared against knockdown of 4R-tau, 3R-tau, and/or total tau by total tau targeting agents (i.e. agents that target a sequence within the MAPT gene shared by 3R-tau and 4R-tau isoforms). Knockdown in cell culture of, e.g., at least about 30%, can thereby be identified as indicative of “inhibiting” or “reducing”, “downregulating” or “suppressing”, etc. having occurred. It is expressly contemplated that assessment of targeted mRNA or encoded protein levels (and therefore an extent of “inhibiting”, etc. caused by an RNAi agent of the disclosure) can also be assessed in in vivo systems for the RNAi agents of the instant disclosure, under properly controlled conditions as described in the art.

[0705] The phrase “inhibiting expression of a 4R-tau gene,” “inhibiting expression of 4R-tau,” “inhibiting 4R-tau,” or “inhibiting a 4R-tau isoform,” as used herein, includes inhibition of expression of any MAPT gene (such as, e.g., a mouse MAPT gene, a rat MAPT gene, a monkey MAPT gene, or a human MAPT gene) as well as variants or mutants of a MAPT gene that encode a 4R-tau. Thus, the MAPT gene may be a wild-type MAPT gene, a mutant MAPT gene, or a transgenic MAPT gene in the context of a genetically manipulated cell, group of cells, or organism.

[0706] “Inhibiting expression of 4R-tau” includes any level of inhibition of a MAPT gene that encodes a 4R-tau, e.g., at least partial suppression of the expression of a MAPT gene, such as an inhibition by at least about 25%. In certain embodiments, inhibition is at least about 25%, at least about 30%, at least about 40%, at least about 50%, at least about 60%, at least about 70%, at least about 80%, at least about 90%, or at least about 95%, or at least about 99%, relative to a control level. 4R-tau inhibition can be measured using the in vitro assay with, e.g., A549 cells and a 10 nM concentration of the RNA agent and the PCR assay as provided in the examples herein, are contemplated to be within the scope of the present disclosure. In some embodiments, 4R-tau inhibition can be measured using the in vitro assay with BE(2)-C cells. In some embodiments, 4R-tau inhibition can be measured using the in vitro assay with Neuro-2a cells. In another embodiment, 4R-tau inhibition can be measured using the in vitro assay with Cos-7 (Dual-Luciferase psiCHECK2 vector). In yet another embodiment, 4R-tau inhibition can be measured using the in vitro assay with primary mouse hepatocytes.

[0707] The expression of a 4R-tau isoform may be assessed based on the level of any variable associated with 4R-tau expression, e.g., 4R-tau encoding MAPT mRNA level (e.g., sense mRNA, antisense mRNA, total MAPT mRNA) or 4R-tau level (e.g., total 4R-tau or wild-type 4R-tau), or, for example, the level of sense- or antisense-containing foci and/or the level of aberrant dipeptide repeat protein.

[0708] Inhibition may be assessed by a decrease in an absolute or relative level of one or more of these variables compared with a control level. The control level may be any type of control level that is utilized in the art, e.g., a pre-dose baseline level, or a level determined from a similar subject, cell, or sample that is untreated or treated with a control (such as, e.g., buffer only control or inactive agent control).

[0709] For example, in some embodiments of the methods of the disclosure, expression of a 4R-tau isoform (e.g., as assessed by sense- or antisense-containing foci and/or aberrant dipeptide repeat protein level) is inhibited by at least 20%, 30%, 40%, 50%, 60%, 70%, 80%, 85%, 90%, or 95%, relative to a control level, or to below the level of detection of the assay. In other embodiments of the methods of the disclosure, expression of a 4R-tau isoform (e.g., as assessed by mRNA or protein expression level) is inhibited by at least about 25%, at least about 30%, at least about 40%, at least about 50%, at least about 60%, at least about 70%, at least about 80%, at least about 90%, or at least about 95% relative to a control level. In certain embodiments, the methods include a clinically relevant inhibition of expression of 4R-tau, e.g. as demonstrated by a clinically relevant outcome after treatment of a subject with an agent of the disclosure to reduce the expression of 4R-tau.

[0710] Inhibition of the expression of a 4R-tau isoform may be manifested by a reduction of the amount of mRNA expressed by a first cell or group of cells (such cells may be present, for example, in a sample derived from a subject) in which a MAPT gene is transcribed and which has or have been treated (e.g., by contacting the cell or cells with an RNAi agent of the disclosure, or by administering an RNAi agent of the disclosure to a subject in which the cells are or were present) such that the expression of a 4R-tau isoform is inhibited, as compared to a second cell or group of cells substantially identical to the first cell or group of cells but which has not or have not been so treated (control cell(s) not treated with an RNAi agent or not treated with an RNAi agent targeted to the gene of interest). The degree of inhibition may be expressed in terms of:

$$\frac{( mRNA in control cells ) - ( mRNA in treated cells )}{( mRNA in control cells )} \times 100 \%$$

[0711] In other embodiments, inhibition of the expression of a 4R-tau isoform may be assessed in terms of a reduction of a parameter that is functionally linked to expression of a 4R-tau isoform, e.g., 4R-tau expression, sense- or antisense-containing foci and/or the level of aberrant dipeptide repeat protein. 4R-tau silencing may be determined in any cell expressing 4R-tau, either endogenous or heterologous from an expression construct, and by any assay known in the art.

[0712] Inhibition of the expression of 4R-tau may be manifested by a reduction in the level of the 4R-tau protein (or functional parameter, e.g., reduction in microtubule assembly) that is expressed by a cell or group of cells (e.g., the level of protein expressed in a sample derived from a subject). As explained above, for the assessment of mRNA suppression, the inhibition of protein expression levels in a treated cell or group of cells may similarly be expressed as a percentage of the level of protein in a control cell or group of cells. In some embodiments, the phrase “inhibiting 4R-tau”, can refer to the inhibition of 4R-tau mRNA expression or 4R-tau protein expression, e.g., at least partial suppression or 4R-tau expression, such as an inhibition by at least about 25%. In certain embodiments, inhibition of the 4R-tau activity is by at least about 25%, at least about 30%, at least about 40%, at least about 50%, at least about 60%, at least about 70%, at least about 80%, at least about 90%, or at least about 95%, or at least about 99%, relative to a control level. Tau protein levels can be measured using an in vitro assay (e.g., with the assay described in Rubenstein et al. (2015) J. Neurotrauma 2015 Marl: 32 (5):342-352; Lim et al. (2014) Comput Struct Biotechnol J. 2014;12(20-21):7-13; and/or Espindola, et al. (2018) Cell Reports 2018 Apr 17; 23:709-715). MAPT expression (e.g., 4R-tau isoforms, 3R-tau isoforms) can be measured using an in vitro assay (e.g., with the assay described in Caillet-Boudin et al. (2015) Mol Neurodegener. 2015; 10:28; Hefti et al. (2018) PLoS ONE 13(4): e0195771; and/or Chen et al. (2010) J Alzheimers Dis. 2010; 22(4): 1313-1329.). 4R-tau expression, specifically, and preferential inhibition of 4R versus 3R expression can be measured using the assay described in the below examples.

[0713] A control cell or group of cells that may be used to assess the inhibition of the expression of a 4R-tau isoform includes a cell or group of cells that has not yet been contacted with an RNAi agent of the disclosure. For example, the control cell or group of cells may be derived from an individual subject (e.g., a human or animal subject) prior to treatment of the subject with an RNAi agent.

[0714] The level of 4R-tau mRNA that is expressed by a cell or group of cells may be determined using any method known in the art for assessing mRNA expression. In one embodiment, the level of expression of 4R-tau in a sample is determined by detecting a transcribed polynucleotide, or portion thereof, e.g., mRNA of the MAPT gene. RNA may be extracted from cells using RNA extraction techniques including, for example, using acid phenol/guanidine isothiocyanate extraction (RNAzol B; Biogenesis), RNEASY™ RNA preparation kits (QIAGEN®) or PAXgene (PreAnalytix, Switzerland). Typical assay formats utilizing ribonucleic acid hybridization include nuclear run-on assays, RT-PCR, RNase protection assays, northern blotting, in situ hybridization, and microarray analysis. Strand specific 4R-tau mRNAs may be detected using the quantitative RT-PCR and or droplet digital PCR methods described in, for example, Jiang, et al. supra, Lagier-Tourenne, et al., supra and Jiang, et al., supra. Circulating 4R-tau mRNA may be detected using methods the described in WO2012/177906, the entire contents of which are hereby incorporated herein by reference.

[0715] In some embodiments, the level of expression of 4R-tau is determined using a nucleic acid probe. The term “probe”, as used herein, refers to any molecule that is capable of selectively binding to a specific 4R-tau nucleic acid or protein, or fragment thereof. Probes can be synthesized by one of skill in the art, or derived from appropriate biological preparations. Probes may be specifically designed to be labeled. Examples of molecules that can be utilized as probes include, but are not limited to, RNA, DNA, proteins, antibodies, and organic molecules.

[0716] Isolated mRNA can be used in hybridization or amplification assays that include, but are not limited to, Southern or northern analyses, polymerase chain reaction (PCR) analyses and probe arrays. One method for the determination of mRNA levels involves contacting the isolated mRNA with a nucleic acid molecule (probe) that can hybridize to 4R-tau mRNA. In one embodiment, the mRNA is immobilized on a solid surface and contacted with a probe, for example by running the isolated mRNA on an agarose gel and transferring the mRNA from the gel to a membrane, such as nitrocellulose. In an alternative embodiment, the probe(s) are immobilized on a solid surface and the mRNA is contacted with the probe(s), for example, in an Affymetrix® gene chip array. A skilled artisan can readily adapt known mRNA detection methods for use in determining the level of 4R-tau mRNA.

[0717] An alternative method for determining the level of expression of 4R-tau in a sample involves the process of nucleic acid amplification or reverse transcriptase (to prepare cDNA) of for example mRNA in the sample, e.g., by RT-PCR (the experimental embodiment set forth in Mullis, 1987, U.S. Pat. No. 4,683,202), ligase chain reaction (Barany (1991) Proc. Natl. Acad. Sci. USA 88:189-193), self-sustained sequence replication (Guatelli et al. (1990) Proc. Natl. Acad. Sci. USA 87:1874-1878), transcriptional amplification system (Kwoh et al. (1989) Proc. Natl. Acad. Sci. USA 86:1173-1177), Q-Beta Replicase (Lizardi et al. (1988) Bio Technology 6:1197), rolling circle replication (Lizardi et al., U.S. Pat. No. 5,854,033) or any other nucleic acid amplification method, followed by the detection of the amplified molecules using techniques well known to those of skill in the art. These detection schemes are especially useful for the detection of nucleic acid molecules if such molecules are present in very low numbers. In particular aspects of the disclosure, the level of expression of 4R-tau is determined by quantitative fluorogenic RT-PCR (i.e., the TAQMAN™ System), by a DUAL-GLO® Luciferase assay, or by other art-recognized method for measurement of 4R-tau expression or mRNA level.

[0718] The expression level of 4R-tau mRNA may be monitored using a membrane blot (such as used in hybridization analysis such as northern, Southern, dot, and the like), or microwells, sample tubes, gels, beads or fibers (or any solid support comprising bound nucleic acids). See U.S. Pat. Nos. 5,770,722, 5,874,219, 5,744,305, 5,677,195 and 5,445,934, which are incorporated herein by reference. The determination of 4R-tau expression level may also comprise using nucleic acid probes in solution.

[0719] In some embodiments, the level of mRNA expression is assessed using branched DNA (bDNA) assays or real time PCR (qPCR). The use of this PCR method is described and exemplified in the Examples presented herein. Such methods can also be used for the detection of 4R-tau nucleic acids.

[0720] The level of 4R-tau expression may be determined using any method known in the art for the measurement of protein levels. Such methods include, for example, electrophoresis, capillary electrophoresis, high performance liquid chromatography (HPLC), thin layer chromatography (TLC), hyperdiffusion chromatography, fluid or gel precipitin reactions, absorption spectroscopy, a colorimetric assays, spectrophotometric assays, flow cytometry, immunodiffusion (single or double), immunoelectrophoresis, western blotting, radioimmunoassay (RIA), enzyme-linked immunosorbent assays (ELISAs), immunofluorescent assays, electrochemiluminescence assays, and the like. Such assays can also be used for the detection of proteins indicative of the presence or replication of 4R-tau. Total Tau, 3R-tau, and/or 4R-tau protein levels can be measured using an in vitro assay (e.g., with the assay described in Rubenstein et al. (2015) J. Neurotrauma 2015 Marl: 32 (5):342-352; Lim et al. (2014) Comput Struct Biotechnol J. 2014;12(20-21):7-13; and/or Espindola, et al. (2018) Cell Reports 2018 Apr 17; 23:709-715).

[0721] The level of sense- or antisense-containing foci and the level of aberrant dipeptide repeat protein may be assessed using methods well-known to one of ordinary skill in the art, including, for example, fluorescent in situ hybridization (FISH), immunohistochemistry and immunoassay (see, e.g., Jiang, et al. supra). In some embodiments, the efficacy of the methods of the disclosure in the treatment of a 4R-tau-associated disease is assessed by a decrease in 4R-tau mRNA level (e.g, by assessment of a CSF sample and/or plasma sample for 4R-tau level, by brain biopsy, or otherwise).

[0722] In some embodiments of the methods of the disclosure, the RNAi agent is administered to a subject such that the RNAi agent is delivered to a specific site within the subject. The inhibition of expression of 4R-tau may be assessed using measurements of the level or change in the level of 4R-tau mRNA (e.g., sense mRNA, antisense mRNA, total 4R-tau mRNA), 4R-tau protein (e.g., total 4R-tau protein, wild-type 4R-tau protein), sense-containing foci, antisense-containing foci, aberrant dipeptide repeat protein in a sample derived from a specific site within the subject, e.g., CNS cells. In certain embodiments, the methods include a clinically relevant inhibition of expression of 4R-tau, e.g. as demonstrated by a clinically relevant outcome after treatment of a subject with an agent of the disclosure to reduce the expression of 4R-tau, such as, for example, stabilization or inhibition of caudate atrophy (e.g., as assessed by volumetric MRI (vMRI)), a stabilization or reduction in neurofilament light chain (NfL) levels in a CSF sample from a subject, a reduction in mutant 4R-tau mRNA or a cleaved mutant 4R-tau, e.g., full-length mutant 4R-tau mRNA or protein and a cleaved mutant 4R-tau mRNA or protein.

[0723] In certain embodiments, an RNAi, e.g., dsRNA, agent of the disclosure may preferentially inhibit 4R-tau, with respect to 3R-tau. Preferential inhibition may occur when the agent is substantially more effective in inhibiting a 4R-tau isoform when compared to inhibition of 3R-tau isoforms (e.g., significantly higher inhibition). In some embodiments, an agent which is 4R-preferential is able to decrease 4R-tau isoform expression (e.g., mRNA levels) by at least about 50%, 55%, 60%, 65%, 70%, or 75%, while decreasing 3R-tau isoform expression (e.g., mRNA levels) by a substantially lesser amount (e.g., by a difference of at least 10%, 15%, 20%, 25%, 30%, 40%, 50%, or more). In some embodiments, an agent which is 4R-preferential is able to decrease 4R-tau isoform expression (e.g., mRNA levels) by no more than about 40%, 35%, 30%, 25%, 20%, 15%, 10%, or 5%, while decreasing 4R-tau isoform expression (e.g., mRNA levels) by a substantially larger amount (e.g., by a difference of at least 10%, 15%, 20%, 25%, 30%, 40%, 50%, or more). In certain embodiments, the agent is able to decrease 4R-tau isoform expression by at least about 70%, while decreasing 3R-tau isoform expression by more than about 30% in a cell expressing both 3R-tau and 4R-tau isoforms. Levels of inhibition may be determined, for example, using methods described herein on a cell which expresses both 3R-tau and 4R-tau isoforms. Preferably, the cell expresses substantially similar levels of the 3R-tau and 4R-tau isoform (by whatever indicator is being used to measure inhibition), such as a 1:1 ratio, or the level of inhibition is able to be normalized to account for differences in control levels of expression. Preferential inhibition may be measured, for instance, using the transfection protocols described in Example 1 and/or the cellular assay described in Example 3. In certain embodiments, preferential inhibition is measured in cells (e.g., HEK293 cells) transfected with exongenous MAPT genes expressing both 3R-tau and 4R-tau isoforms.

[0724] As used herein, the terms detecting or determining a level of an analyte are understood to mean performing the steps to determine if a material, e.g., protein, RNA, is present. As used herein, methods of detecting or determining include detection or determination of an analyte level that is below the level of detection for the method used.

### IX. Methods of Treating or Preventing 4R-Tau-Associated Diseases

[0725] The present disclosure also provides methods of using an RNAi agent of the disclosure or a composition containing an RNAi agent of the disclosure to reduce or inhibit 4R-tau expression in a cell. The methods include contacting the cell with a dsRNA of the disclosure and maintaining the cell for a time sufficient to obtain degradation of the 4R-tau mRNA transcript of a MAPT gene, thereby inhibiting expression of the 4R-tau isoform in the cell.

[0726] In addition, the present disclosure also provides methods of using an RNAi agent of the disclosure or a composition containing an RNAi agent of the disclosure to reduce the level and/or inhibit formation of sense- and antisense-containing foci in a cell. The methods include contacting the cell with a dsRNA of the disclosure, thereby reducing the level of the 4R-tau sense- and antisense-containing foci in the cell.

[0727] The present disclosure also provides methods of using an RNAi agent of the disclosure or a composition containing an RNAi agent of the disclosure to reduce the level and/or inhibit formation of aberrant dipeptide repeat protein in a cell. The methods include contacting the cell with a dsRNA of the disclosure, thereby reducing the level of the aberrant dipeptide repeat protein in the cell.

[0728] Reduction in gene expression, the level of 4R-tau sense- and antisense-containing foci, and/or aberrant dipeptide repeat protein can be assessed by any methods known in the art. For example, a reduction in the expression of 4R-tau may be determined by determining the 4R-tau mRNA expression level of MAPT using methods routine to one of ordinary skill in the art, e.g., northern blotting, qRT-PCR; by determining the protein level of 4R-tau using methods routine to one of ordinary skill in the art, such as western blotting, immunological techniques.

[0729] In the methods of the disclosure the cell may be contacted in vitro or in vivo, i.e., the cell may be within a subject. The subject may be a human. The subject may have a 4R-tau-associated disorder. The 4R-tau-associated disorder may be a neurodegenerative disorder. The neurodegenerative disorder of the subject can be associated with an abnormality of MAPT gene encoded protein 4R-tau. The abnormality of MAPT gene encoded protein 4R-tau may result in aggregation of 4R-tau in the subject's brain.

[0730] A cell suitable for treatment using the methods of the disclosure may be any cell that expresses a 4R-tau isoform. A cell suitable for use in the methods of the disclosure may be a mammalian cell, e.g., a primate cell (such as a human cell or a non-human primate cell, e.g., a monkey cell or a chimpanzee cell), a non-primate cell (such as a rat cell, or a mouse cell). In one embodiment, the cell is a human cell, e.g., a human CNS cell.

[0731] 4R-tau expression (e.g., as assessed by sense mRNA, antisense mRNA, total 4R-tau mRNA, total 4R-tau protein) is inhibited in the cell by about 20%, 25%, 30%, 35%, 40%, 45%, or 50% relative to the expression in a control cell. In certain embodiments, 4R-tau expression is inhibited by at least about 50%, at least about 60%, at least about 70%, at least about 80%, at least about 90%, or at least about 95% relative to a control level.

[0732] In preferred embodiments, 4R-tau expression is inhibited in the cell by at least 30%. In particular embodiments, inhibiting expression of 4R-tau may decrease 4R-tau protein level in serum of the subject by at least 30%.

[0733] Inhibition, as assessed by sense- or antisense-containing foci and/or aberrant dipeptide repeat protein level) is inhibited in the cell by at least 20%, 30%, 40%, preferably at least 50%, 60%, 70%, 80%, 85%, 90%, or 95%, or to below the level of detection of the assay.

[0734] The in vivo methods of the disclosure may include administering to a subject a composition containing an RNAi agent of the disclosure, where the RNAi agent includes a nucleotide sequence that is complementary to at least a part of a hotspot within exon 10 of an RNA transcript of the MAPT gene of the mammal to be treated. When the organism to be treated is a mammal such as a human, the composition can be administered by any means known in the art including, but not limited to oral, intraperitoneal, or parenteral routes, including intracranial (e.g., intraventricular, intraparenchymal, and intrathecal), intravenous, intramuscular, intravitreal, subcutaneous, transdermal, airway (aerosol), nasal, rectal, and topical (including buccal and sublingual) administration. In certain embodiments, the compositions are administered by intravenous infusion or injection. In certain embodiments, the compositions are administered by subcutaneous injection. In certain embodiments, the compositions are administered by intrathecal injection.

[0735] In some embodiments, the administration is via a depot injection. A depot injection may release the RNAi agent in a consistent way over a prolonged time period. Thus, a depot injection may reduce the frequency of dosing needed to obtain a desired effect, e.g., a desired inhibition of 4R-tau, or a therapeutic or prophylactic effect. A depot injection may also provide more consistent serum concentrations. Depot injections may include subcutaneous injections or intramuscular injections. In preferred embodiments, the depot injection is a subcutaneous injection.

[0736] In some embodiments, the administration is via a pump. The pump may be an external pump or a surgically implanted pump. In certain embodiments, the pump is a subcutaneously implanted osmotic pump. In other embodiments, the pump is an infusion pump. An infusion pump may be used for intracranial, intravenous, subcutaneous, arterial, or epidural infusions. In preferred embodiments, the infusion pump is a subcutaneous infusion pump. In other embodiments, the pump is a surgically implanted pump that delivers the RNAi agent to the CNS.

[0737] The mode of administration may be chosen based upon whether local or systemic treatment is desired and based upon the area to be treated. The route and site of administration may be chosen to enhance targeting.

[0738] In one aspect, the present disclosure also provides methods for inhibiting the expression of a 4R-tau isoform in a mammal. The methods include administering to the mammal a composition comprising a dsRNA of the disclosure that targets a 4R-tau transcript in a cell of the mammal, thereby inhibiting expression of the 4R-tau isoform in the cell. Reduction in gene expression can be assessed by any methods known it the art and by methods, e.g. qRT-PCR, described herein. Reduction in protein production can be assessed by any methods known it the art and by methods, e.g. ELISA, described herein. In one embodiment, a CNS biopsy sample or a cerebrospinal fluid (CSF) sample serves as the tissue material for monitoring the reduction in 4R-tau mRNA or protein expression (or of a proxy therefore).

[0739] The present disclosure further provides methods of treatment of a subject in need thereof. The treatment methods of the disclosure include administering an RNAi agent of the disclosure to a subject, e.g., a subject that would benefit from inhibition of 4R-tau expression, such as a subject having missense and/or deletion mutations in the MAPT gene, in a therapeutically effective amount of the RNAi agent or a pharmaceutical composition comprising the RNAi agent.

[0740] In addition, the present disclosure provides methods of preventing, treating or inhibiting the progression of a 4R-tau-associated disease, such as a 4R-tauopathy (e.g., PSP, CBD, AGD, MSTD, GGT, spAD, or rpAD), in a subject. The methods include administering to the subject a therapeutically effective amount of any of the RNAi agent, e.g., dsRNA agents, of the disclosure or a pharmaceutical composition comprising an RNAi agent of the disclosure as provided herein, thereby preventing, treating or inhibiting the progression of a 4R-tau-associated disease or disorder in the subject. A 4R-tau-associated disease or disorder that can be prevented by the method of the disclosure can be associated with an abnormality of MAPT gene encoded protein 4R-tau. The abnormality of MAPT gene encoded protein 4R-tau results in aggregation of 4R-tau in subject's brain. The subject may be human. Administration of a dsRNA agent of the disclosure, or a pharmaceutical composition comprising a dsRNA agent of the disclosure as described herein, may cause a decrease in 4R-tau aggregation in the subject's brain.

[0741] An RNAi agent of the disclosure may be administered as a “free RNAi agent.” A free RNAi agent is administered in the absence of a pharmaceutical composition. The naked RNAi agent may be in a suitable buffer solution. The buffer solution may comprise acetate, citrate, prolamine, carbonate, or phosphate, or any combination thereof. In one embodiment, the buffer solution is phosphate buffered saline (PBS). The pH and osmolarity of the buffer solution containing the RNAi agent can be adjusted such that it is suitable for administering to a subject.

[0742] Alternatively, an RNAi agent of the disclosure may be administered as a pharmaceutical composition, such as a dsRNA liposomal formulation.

[0743] Subjects that would benefit from a reduction or inhibition of 4R-tau isoform expression are those having a 4R-tau-associated disease. Exemplary 4R-tau-associated diseases include 4R-tauopathies, which include, but are not limited to, PSP, CBD, AGD, MSTD, GGT, spAD, and rpAD. The disclosure further provides methods for the use of an RNAi agent of the disclosure or a pharmaceutical composition thereof, e.g., for treating a subject that would benefit from reduction or inhibition of 4R-tau expression, e.g., a subject having a 4R-tau-associated disorder, in combination with other pharmaceuticals or other therapeutic methods, e.g., with known pharmaceuticals or known therapeutic methods, such as, for example, those which are currently employed for treating these disorders. For example, in certain embodiments, an RNAi agent targeting 4R-tau is administered in combination with, e.g., an agent useful in treating a 4R-tau-associated disorder as described elsewhere herein or as otherwise known in the art. For example, additional agents suitable for treating a subject that would benefit from reduction in 4R-tau expression, e.g., a subject having a 4R-tau-associated disorder, may include agents currently used to treat symptoms of 4R-tau-associated diseases. The RNAi agent and additional therapeutic agents may be administered at the same time or in the same combination, e.g., intrathecally, or the additional therapeutic agent can be administered as part of a separate composition or at separate times or by another method known in the art or described herein.

[0744] Exemplary additional therapeutics include, for example, a monoamine inhibitor, e.g., tetrabenazine (Xenazine), deutetrabenazine (Austedo), and reserpine, an anticonvulsant, e.g., valproic acid (Depakote, Depakene, Depacon), and clonazepam (Klonopin), an antipsychotic agent, e.g., risperidone (Risperdal), and haloperidol (Haldol), and an antidepressant, e.g., paroxetine (Paxil).

[0745] In one embodiment, the method includes administering a composition featured herein such that expression of the target 4R-tau isoform is decreased, for at least one month. In preferred embodiments, expression is decreased for at least 2 months, 3 months, or 6 months.

[0746] Preferably, the RNAi agents useful for the methods and compositions featured herein specifically target RNAs (primary or processed) of the target 4R-tau isoform. Compositions and methods for inhibiting the expression of these isoforms using RNAi agents can be prepared and performed as described herein.

[0747] Administration of the dsRNA according to the methods of the disclosure may result in a reduction of the severity, signs, symptoms, or markers of such diseases or disorders in a patient with a 4R-tau-associated disorder. By “reduction” in this context is meant a statistically significant or clinically significant decrease in such level. The reduction can be, for example, at least about 5%, at least about 10%, at least about 15%, at least about 20%, at least about 25%, at least about 30%, at least about 35%, at least about 40%, at least about 45%, at least about 50%, at least about 55%, at least about 60%, at least about 65%, at least about 70%, at least about 75%, at least about 80%, at least about 85%, at least about 90%, at least about 95%, or about 100% relative to a control level. Efficacy of treatment or prevention of disease can be assessed, for example by measuring disease progression, disease remission, symptom severity, reduction in pain, quality of life, dose of a medication required to sustain a treatment effect, level of a disease marker or any other measurable parameter appropriate for a given disease being treated or targeted for prevention. It is well within the ability of one skilled in the art to monitor efficacy of treatment or prevention by measuring any one of such parameters, or any combination of parameters. For example, efficacy of treatment of a 4R-associated disorder may be assessed, for example, by periodic monitoring of a subject's. Comparisons of the later readings with the initial readings provide a physician an indication of whether the treatment is effective. It is well within the ability of one skilled in the art to monitor efficacy of treatment or prevention by measuring any one of such parameters, or any combination of parameters. In connection with the administration of an RNAi agent targeting 4R-tau or pharmaceutical composition thereof, “effective against” a 4R-tau-associated disorder indicates that administration in a clinically appropriate manner results in a beneficial effect for at least a statistically significant fraction of patients, such as an improvement of symptoms, a cure, a reduction in disease, extension of life, improvement in quality of life, or other effect generally recognized as positive by medical doctors familiar with treating 4R-tau-associated disorders and the related causes.

[0748] A treatment or preventive effect is evident when there is a statistically significant improvement in one or more parameters of disease status, or by a failure to worsen or to develop symptoms where they would otherwise be anticipated. As an example, a favorable change of at least 10% in a measurable parameter of disease, and preferably at least 20%, 30%, 40%, 50% or more can be indicative of effective treatment. Efficacy for a given RNAi agent drug or formulation of that drug can also be judged using an experimental animal model for the given disease as known in the art. When using an experimental animal model, efficacy of treatment is evidenced when a statistically significant reduction in a marker or symptom is observed.

[0749] Alternatively, the efficacy can be measured by a reduction in the severity of disease as determined by one skilled in the art of diagnosis based on a clinically accepted disease severity grading scale. Any positive change resulting in e.g., lessening of severity of disease measured using the appropriate scale, represents adequate treatment using an RNAi agent or RNAi agent formulation as described herein.

[0750] In certain embodiments, subjects can be administered a therapeutic amount of dsRNA, such as about 0.01 mg/kg to about 200 mg/kg. In other embodiments, subjects can be administered a therapeutic amount of dsRNA, such as about 0.01 mg/kg to about 500 mg/kg. In yet other embodiments, subjects can be administered a therapeutic amount of dsRNA of about 500 mg/kg or more.

[0751] The RNAi agent can be administered intrathecally, via intravitreal injection, or by intravenous infusion over a period of time, on a regular basis. In certain embodiments, after an initial treatment regimen, the treatments can be administered on a less frequent basis. Administration of the RNAi agent can reduce 4R-tau levels, e.g., in a cell, tissue, blood, CSF sample or other compartment of the patient. In one embodiment, administration of the RNAi agent can reduce 4R-tau levels, e.g., in a cell, tissue, blood, CSF sample or other compartment of the patient by at least about 25%, such as about 25%, about 30%, about 40%, about 50%, about 60%, about 70%, about 80%, about 90%, or about 95% relative to a control level.

[0752] Before administration of a full dose of the RNAi agent, patients can be administered a smaller dose, such as a 5% infusion reaction, and monitored for adverse effects, such as an allergic reaction. In another example, the patient can be monitored for unwanted immunostimulatory effects, such as increased cytokine (e.g., TNF-alpha or INF-alpha) levels.

[0753] Alternatively, the RNAi agent can be administered subcutaneously, i.e., by subcutaneous injection. One or more injections may be used to deliver the desired, e.g., monthly dose of RNAi agent to a subject. The injections may be repeated over a period of time. The administration may be repeated on a regular basis. In certain embodiments, after an initial treatment regimen, the treatments can be administered on a less frequent basis. A repeat-dose regimen may include administration of a therapeutic amount of RNAi agent on a regular basis, such as monthly or extending to once a quarter, twice per year, once per year. In certain embodiments, the RNAi agent is administered about once per month to about once per quarter (i.e., about once every three months).

[0754] Unless otherwise defined, all technical and scientific terms used herein have the same meaning as commonly understood by one of ordinary skill in the art to which this invention belongs. Although methods and materials similar or equivalent to those described herein can be used in the practice or testing of the RNAi agents and methods featured in the invention, suitable methods and materials are described below. All publications, patent applications, patents, and other references mentioned herein are incorporated by reference in their entirety. In case of conflict, the present specification, including definitions, will control. In addition, the materials, methods, and examples are illustrative only and not intended to be limiting.

[0755] An informal Sequence Listing is filed herewith and forms part of the specification as filed.

### EXAMPLES

### Example 1. RNAi Agent Design, Synthesis, Selection, and in Vitro Evaluation

[0756] This Example describes methods for the design, synthesis, selection, and in vitro evaluation of candidate 4R-tau RNAi agents.

### Source of Reagents

[0757] Where the source of a reagent is not specifically given herein, such reagent can be obtained from any supplier of reagents for molecular biology at a quality/purity standard for application in molecular biology.

### Bioinformatics

[0758] siRNAs targeting exon 10 (SEQ ID NO: 13, nucleotides 973-1065 of SEQ ID NO: 3) of the human MAPT transcript (Homo sapiens microtubule associated protein tau (MAPT), transcript variant 2, mRNA, NCBI refseqID NM_005910.6; NCBI GeneID: 4137) were designed using custom R and Python scripts. The human NM_005910.6 mRNA has a length of 5,639 bases.

[0759] Detailed lists of the unmodified sense and antisense strand nucleotide sequences targeting exon 10 of the human MAPT transcript are shown in Table 3. Detailed lists of the modified sense and antisense strand nucleotide sequences targeting human exon 10 of the MAPT transcript are shown in Tables 4 and 5.

[0760] It is to be understood that, throughout the application, a duplex name without a decimal is equivalent to a duplex name with a decimal which merely references the batch number of the duplex. For example, AD-1423242 is equivalent to AD-1423242.1.

### In Vitro Screening in BE(2)-C Cells

i. Cell Culture and Transfections:

[0761] BE(2)-C(ATCC) were transfected by adding 5 μL of Opti-MEM plus 0.1 μL of Lipofectamine RNAimax per well (Invitrogen, Carlsbad CA. cat #13778-150) to 5 μL of siRNA duplexes per well, with 4 replicates of each siRNA duplex, into a 384-well plate, and incubating at room temperature for 15 minutes. Forty μL of 1:1 mixture of Minimum Essential Medium and F12 Medium (ThermoFisher) containing ˜5×10³ cells were then added to the siRNA mixture. Cells were incubated for 24 hours prior to RNA purification. Three dose experiments were performed at 10 nM, 1 nM and 0.1 nM. The results of the screening of the dsRNA agents in BE(2)-C cells are shown in Table 6.

ii. Total RNA isolation using DYNABEADS mRNA Isolation Kit:

[0762] RNA was isolated using an automated protocol on a BioTek-EL406 platform using DYNABEADs (Invitrogen, cat #61012). Briefly, 70 μL of Lysis/Binding Buffer and 10 μL of lysis buffer containing 3 μL of magnetic beads were added to the plate with cells. Plates were incubated on an electromagnetic shaker for 10 minutes at room temperature and then magnetic beads were captured and the supernatant was removed. Bead-bound RNA was then washed 2 times with 150 μL Wash Buffer A and once with Wash Buffer B. Beads were then washed with 150 μL Elution Buffer, re-captured and supernatant removed.

iii. cDNA Synthesis Using ABI High Capacity cDNA Reverse Transcription Kit (Applied Biosystems, Foster City, CA, Cat #4368813):

[0763] Ten μL of a master mix containing 1 μL 10× Buffer, 0.4 μl 25× dNTPs, 1 μL 10× Random primers, 0.5 μL Reverse Transcriptase, 0.5 μL RNase inhibitor and 6.6 μL of water per reaction was added to RNA isolated above. Plates were sealed, mixed, and incubated on an electromagnetic shaker for 10 minutes at room temperature, followed by 2 hours at 37° C.

iv. Real Time PCR:

[0764] Two μl of cDNA and 5 μL Lightcycler 480 probe master mix (Roche Cat #04887301001) were added to either 0.5 μL of Human GAPDH TaqMan Probe (4326317E) and 0.5 μL human MAPT probe (hs00902194 ml, Thermo) or 0.5 μL Mouse GAPDH TaqMan Probe (4352339E) and 0.5 μL mouse MAPT probe (Mm00521988 ml, Thermo) per well in a 384 well plates (Roche cat #04887301001). Real time PCR was done in a LightCycler480 Real Time PCR system (Roche). Each duplex was tested at least two times and data were normalized to cells transfected with a non-targeting control siRNA. To calculate relative fold change, real time data were analyzed using the ΔΔCt method and normalized to assays performed with cells transfected with a non-targeting control siRNA.

TABLE 2
Abbreviations of nucleotide monomers used in nucleic acid sequence representation. It will be
understood that these monomers, when present in an oligonucleotide, are mutually linked by 5′-3′-
phosphodiester bonds, and it is understood that when the nucleotide contains a 2′-fluoro modification,
then the fluoro replaces the hydroxy at that position in the parent nucleotide (i.e., it is a 2′-deoxy-2′-
fluoronucleotide). It is also understood that the following abbreviations omit the 3′-phosphate (i.e. they
are 3′-OH) when placed at the 3′-terminal position of an oligonucleotide.

| Abbreviation | Nucleotide(s) |
|---|---|
| A | Adenosine-3′-phosphate |
| Ab | beta-L-adenosine-3′-phosphate |
| Abs | beta-L-adenosine-3′-phosphorothioate |
| Af | 2′-fluoroadenosine-3′-phosphate |
| Afs | 2′-fluoroadenosine-3′-phosphorothioate |
| As | adenosine-3′-phosphorothioate |
| (A2p) | adenosine-2′-phosphate |
| (A2ps) | adenosine-2′-phosphorothioate |
| C | cytidine-3′-phosphate |
| Cb | beta-L-cytidine-3′-phosphate |
| Cbs | beta-L-cytidine-3′-phosphorothioate |
| Cf | 2′-fluorocytidine-3′-phosphate |
| Cfs | 2′-fluorocytidine-3′-phosphorothioate |
| Cs | cytidine-3′-phosphorothioate |
| (C2p) | cytidine-2′-phosphate |
| (C2ps) | cytidine-2′-phosphorothioate |
| G | guanosine-3′-phosphate |
| Gb | beta-L-guanosine-3′-phosphate |
| Gbs | beta-L-guanosine-3′-phosphorothioate |
| Gf | 2′-fluoroguanosine-3′-phosphate |
| Gfs | 2′-fluoroguanosine-3′-phosphorothioate |
| Gs | guanosine-3′-phosphorothioate |
| (G2p) | guanosine-2′-phosphate |
| (G2ps) | guanosine-2′-phosphorothioate |
| T | 5′-methyluridine-3′-phosphate |
| Tf | 2′-fluoro-5-methyluridine-3′-phosphate |
| Tfs | 2′-fluoro-5-methyluridine-3′-phosphorothioate |
| Ts | 5-methyluridine-3′-phosphorothioate |
| U | Uridine-3′-phosphate |
| Uf | 2′-fluorouridine-3′-phosphate |
| Ufs | 2′-fluorouridine -3′-phosphorothioate |
| Us | uridine-3′-phosphorothioate |
| (U2p) | uridine-2′-phosphate |
| (U2ps) | uridine-2′-phosphorothioate |
| N | any nucleotide, modified or unmodified |
| a | 2′-O-methyladenosine-3′-phosphate |
| as | 2′-O-methyladenosine-3′-phosphorothioate |
| c | 2′-O-methylcytidine-3′-phosphate |
| cs | 2′-O-methylcytidine-3′-phosphorothioate |
| g | 2′-O-methylguanosine-3′-phosphate |
| gs | 2′-O-methylguanosine-3′-phosphorothioate |
| t | 2′-O-methyl-5-methyluridine-3′-phosphate |
| ts | 2′-O-methyl-5-methyluridine-3′-phosphorothioate |
| u | 2′-O-methyluridine-3′-phosphate |
| us | 2′-O-methyluridine-3′-phosphorothioate |
| s | phosphorothioate linkage |
| L96 | (2S,4R)-1-[29-[[2-(acetylamino)-2-deoxy-β-D-galactopyranosyl]oxy]-14,14- bis[[3-[[3-[[5-[[2-(acetylamino)-2-deoxy-β-D-galactopyranosyl]oxy]-1- oxopentyl]amino]propyl]amino]-3-oxopropoxy]methyl]-1,12,19,25-tetraoxo- 16-oxa-13,20,24-triazanonacos-1-yl]-4-hydroxy-2-hydroxymethylpyrrolidine (N-[tris(GalNAc-alkyl)-amidodecanoyl)]-4-hydroxyprolinol or Hyp-(GalNAc- alkyl)3) [chemical structure] |
| uL96 | 2′-O-methyluridine-3′-phosphate ((2S,4R)-1-[29-[[2-(acetylamino)-2-deoxy-β- D-galactopyranosyl]oxy]-14,14-bis [[3-[[3-[[5-[2-(acetylamino)-2-deoxy-β-D- galactopyranosyl]oxy]-1-oxopentyl]amino]propyl]amino]-3- oxopropoxy]methyl]-1,12,19,25-tetraoxo-16-oxa-13,20,24-triazanonacos-1-yl]- 4-hydroxy-2-pyrrolidinyl)methyl ester [chemical structure] |
| Y34 | 2-hydroxymethyl-tetrahydrofuran-4-methoxy-3-phosphate (abasic 2′-OMe |
| | furanose) |
| Y44 | inverted abasic DNA (2-hydroxymethyl-tetrahydrofuran-5-phosphate) |
| (Agn) | Adenosine-glycol nucleic acid (GNA) |
| (Cgn) | Cytidine-glycol nucleic acid (GNA) |
| (Ggn) | Guanosine-glycol nucleic acid (GNA) |
| (Tgn) | Thymidine-glycol nucleic acid (GNA) S-Isomer |
| P | Phosphate |
| VP | Vinyl-phosphonate |
| dA | 2′-deoxyadenosine-3′-phosphate |
| dAs | 2′-deoxyadenosine-3′-phosphorothioate |
| dC | 2′-deoxycytidine-3′-phosphate |
| dCs | 2′-deoxycytidine-3′-phosphorothioate |
| dG | 2′-deoxyguanosine-3′-phosphate |
| dGs | 2′-deoxyguanosine-3′-phosphorothioate |
| dT | 2′-deoxythymidine-3′-phosphate |
| dTs | 2′-deoxythymidine-3′-phosphorothioate |
| dU | 2′-deoxyuridine |
| dUs | 2′-deoxyuridine-3′-phosphorothioate |
| (Ahd) | 2′-O-hexadecyl-adenosine-3′-phosphate |
| (Ahds) | 2′-O-hexadecyl-adenosine-3′-phosphorothioate |
| (Chd) | 2′-O-hexadecyl-cytidine-3′-phosphate |
| (Chds) | 2′-O-hexadecyl-cytidine-3′-phosphorothioate |
| (Ghd) | 2′-O-hexadecyl-guanosine-3′-phosphate |
| (Ghds) | 2′-O-hexadecyl-guanosine-3′-phosphorothioate |
| (Uhd) | 2′-O-hexadecyl-uridine-3′-phosphate |
| (Uhds) | 2′-O-hexadecyl-uridine-3′-phosphorothioate |

TABLE 3
Unmodified Sense and Antisense Strand Sequences of MAPT Candidate dsRNA Agents
Targeting Exon 10

| | Sense Sequence | SEQ ID | Range in | Antisense Sequence | SEQ ID | Range in |
|---|---|---|---|---|---|---|
| Duplex Name | 5′ to 3′ | NO: | NM_005910.6 | 5′ to 3′ | NO: | NM_005910.6 |
| AD-1423242 | GCAGAUAAUUAAU | 18 | 975-995 | UGCUTCTUAUUAAU | 95 | 973-995 |
| | AAGAAGCA | | | UAUCUGCAC | | |
| AD-1423243 | CAGAUAAUUAAUA | 19 | 976-996 | UAGCTUCUUAUTAA | 96 | 974-996 |
| | AGAAGCUA | | | UUAUCUGCA | | |
| AD-1423244 | AGAUAAUUAAUAA | 20 | 977-997 | UCAGCUTCUUATUA | 97 | 975-997 |
| | GAAGCUGA | | | AUUAUCUGC | | |
| AD-1423245 | GAUAAUUAAUAAG | 21 | 978-998 | UCCAGCTUCUUAUU | 98 | 976-998 |
| | AAGCUGGA | | | AAUUAUCUG | | |
| AD-1423246 | AUAAUUAAUAAGA | 22 | 979-999 | UTCCAGCUUCUTAU | 99 | 977-999 |
| | AGCUGGAA | | | UAAUUAUCU | | |
| AD-1423247 | UAAUUAAUAAGAA | 23 | 980-1000 | UAUCCAGCUUCTUA | 100 | 978-1000 |
| | GCUGGAUA | | | UUAAUUAUC | | |
| AD-1423248 | AAUUAAUAAGAAG | 24 | 981-1001 | UGAUCCAGCUUCU | 101 | 979-1001 |
| | CUGGAUCA | | | UAUUAAUUAU | | |
| AD-1423249 | AUUAAUAAGAAGC | 25 | 982-1002 | UAGATCCAGCUTCU | 102 | 980-1002 |
| | UGGAUCUA | | | UAUUAAUUA | | |
| AD-1423250 | UUAAUAAGAAGCU | 26 | 983-1003 | UAAGAUCCAGCTUC | 103 | 981-1003 |
| | GGAUCUUA | | | UUAUUAAUU | | |
| AD-1423251 | UAAUAAGAAGCUG | 27 | 984-1004 | UTAAGATCCAGCUU | 104 | 982-1004 |
| | GAUCUUAA | | | CUUAUUAAU | | |
| AD-1423252 | AAUAAGAAGCUGG | 28 | 985-1005 | UCUAAGAUCCAGC | 105 | 983-1005 |
| | AUCUUAGA | | | UUCUUAUUAA | | |
| AD-1423253 | AUAAGAAGCUGGA | 29 | 986-1006 | UGCUAAGAUCCAG | 106 | 984-1006 |
| | UCUUAGCA | | | CUUCUUAUUA | | |
| AD-1423254 | UAAGAAGCUGGAU | 30 | 987-1007 | UTGCTAAGAUCCAG | 107 | 985-1007 |
| | CUUAGCAA | | | CUUCUUAUU | | |
| AD-1423255 | AAGAAGCUGGAUC | 31 | 988-1008 | UTUGCUAAGAUCCA | 108 | 986-1008 |
| | UUAGCAAA | | | GCUUCUUAU | | |
| AD-1423256 | AGAAGCUGGAUCU | 32 | 989-1009 | UGUUGCTAAGATCC | 109 | 987-1009 |
| | UAGCAACA | | | AGCUUCUUA | | |
| AD-1423257 | GAAGCUGGAUCUU | 33 | 990-1010 | UCGUTGCUAAGAUC | 110 | 988-1010 |
| | AGCAACGA | | | CAGCUUCUU | | |
| AD-1423258 | AAGCUGGAUCUUA | 34 | 991-1011 | UACGTUGCUAAGA | 111 | 989-1011 |
| | GCAACGUA | | | UCCAGCUUCU | | |
| AD-1423259 | AGCUGGAUCUUAG | 35 | 992-1012 | UGACGUTGCUAAG | 112 | 990-1012 |
| | CAACGUCA | | | AUCCAGCUUC | | |
| AD-1423260 | GCUGGAUCUUAGC | 36 | 993-1013 | UGGACGTUGCUAA | 113 | 991-1013 |
| | AACGUCCA | | | GAUCCAGCUU | | |
| AD-1423261 | CUGGAUCUUAGCA | 37 | 994-1014 | UTGGACGUUGCTAA | 114 | 992-1014 |
| | ACGUCCAA | | | GAUCCAGCU | | |
| AD-1423262 | UGGAUCUUAGCAA | 38 | 995-1015 | UCUGGACGUUGCU | 115 | 993-1015 |
| | CGUCCAGA | | | AAGAUCCAGC | | |
| AD-1423263 | GGAUCUUAGCAAC | 39 | 996-1016 | UACUGGACGUUGC | 116 | 994-1016 |
| | GUCCAGUA | | | UAAGAUCCAG | | |
| AD-1423264 | GAUCUUAGCAACG | 40 | 997-1017 | UGACTGGACGUTGC | 117 | 995-1017 |
| | UCCAGUCA | | | UAAGAUCCA | | |
| AD-1423265 | AUCUUAGCAACGU | 41 | 998-1018 | UGGACUGGACGTU | 118 | 996-1018 |
| | CCAGUCCA | | | GCUAAGAUCC | | |
| AD-1423266 | UCUUAGCAACGUC | 42 | 999-1019 | UTGGACTGGACGUU | 119 | 997-1019 |
| | CAGUCCAA | | | GCUAAGAUC | | |
| AD-1423267 | CUUAGCAACGUCC | 43 | 1000-1020 | UTUGGACUGGACG | 120 | 998-1020 |
| | AGUCCAAA | | | UUGCUAAGAU | | |
| AD-1423268 | UUAGCAACGUCCA | 44 | 1001-1021 | UCUUGGACUGGAC | 121 | 999-1021 |
| | GUCCAAGA | | | GUUGCUAAGA | | |
| AD-1423269 | UAGCAACGUCCAG | 45 | 1002-1022 | UACUTGGACUGGAC | 122 | 1000-1022 |
| | UCCAAGUA | | | GUUGCUAAG | | |
| AD-1423270 | AGCAACGUCCAGU | 46 | 1003-1023 | UCACTUGGACUGGA | 123 | 1001-1023 |
| | CCAAGUGA | | | CGUUGCUAA | | |
| AD-1423271 | GCAACGUCCAGUC | 47 | 1004-1024 | UACACUTGGACTGG | 124 | 1002-1024 |
| | CAAGUGUA | | | ACGUUGCUA | | |
| AD-1423272 | CAACGUCCAGUCC | 48 | 1005-1025 | UCACACTUGGACUG | 125 | 1003-1025 |
| | AAGUGUGA | | | GACGUUGCU | | |
| AD-1423273 | AACGUCCAGUCCA | 49 | 1006-1026 | UCCACACUUGGACU | 126 | 1004-1026 |
| | AGUGUGGA | | | GGACGUUGC | | |
| AD-1423274 | ACGUCCAGUCCAA | 50 | 1007-1027 | UGCCACACUUGGAC | 127 | 1005-1027 |
| | GUGUGGCA | | | UGGACGUUG | | |
| AD-1423275 | CGUCCAGUCCAAG | 51 | 1008-1028 | UAGCCACACUUGG | 128 | 1006-1028 |
| | UGUGGCUA | | | ACUGGACGUU | | |
| AD-1423276 | GUCCAGUCCAAGU | 52 | 1009-1029 | UGAGCCACACUTGG | 129 | 1007-1029 |
| | GUGGCUCA | | | ACUGGACGU | | |
| AD-1423277 | UCCAGUCCAAGUG | 53 | 1010-1030 | UTGAGCCACACTUG | 130 | 1008-1030 |
| | UGGCUCAA | | | GACUGGACG | | |
| AD-1423278 | CCAGUCCAAGUGU | 54 | 1011-1031 | UTUGAGCCACACUU | 131 | 1009-1031 |
| | GGCUCAAA | | | GGACUGGAC | | |
| AD-1423279 | CAGUCCAAGUGUG | 55 | 1012-1032 | UTUUGAGCCACACU | 132 | 1010-1032 |
| | GCUCAAAA | | | UGGACUGGA | | |
| AD-1423280 | AGUCCAAGUGUGG | 56 | 1013-1033 | UCUUTGAGCCACAC | 133 | 1011-1033 |
| | CUCAAAGA | | | UUGGACUGG | | |
| AD-1423281 | GUCCAAGUGUGGC | 57 | 1014-1034 | UCCUTUGAGCCACA | 134 | 1012-1034 |
| | UCAAAGGA | | | CUUGGACUG | | |
| AD-1423282 | UCCAAGUGUGGCU | 58 | 1015-1035 | UTCCTUTGAGCCAC | 135 | 1013-1035 |
| | CAAAGGAA | | | ACUUGGACU | | |
| AD-1423283 | CCAAGUGUGGCUC | 59 | 1016-1036 | UAUCCUTUGAGCCA | 136 | 1014-1036 |
| | AAAGGAUA | | | CACUUGGAC | | |
| AD-1423284 | CAAGUGUGGCUCA | 60 | 1017-1037 | UTAUCCTUUGAGCC | 137 | 1015-1037 |
| | AAGGAUAA | | | ACACUUGGA | | |
| AD-1423285 | AAGUGUGGCUCAA | 61 | 1018-1038 | UTUATCCUUUGAGC | 138 | 1016-1038 |
| | AGGAUAAA | | | CACACUUGG | | |
| AD-1423286 | AGUGUGGCUCAAA | 62 | 1019-1039 | UAUUAUCCUUUGA | 139 | 1017-1039 |
| | GGAUAAUA | | | GCCACACUUG | | |
| AD-1423287 | GUGUGGCUCAAAG | 63 | 1020-1040 | UTAUTATCCUUTGA | 140 | 1018-1040 |
| | GAUAAUAA | | | GCCACACUU | | |
| AD-1423288 | UGUGGCUCAAAGG | 64 | 1021-1041 | UAUATUAUCCUTUG | 141 | 1019-1041 |
| | AUAAUAUA | | | AGCCACACU | | |
| AD-1423289 | GUGGCUCAAAGGA | 65 | 1022-1042 | UGAUAUTAUCCTUU | 142 | 1020-1042 |
| | UAAUAUCA | | | GAGCCACAC | | |
| AD-1423290 | UGGCUCAAAGGAU | 66 | 1023-1043 | UTGATATUAUCCUU | 143 | 1021-1043 |
| | AAUAUCAA | | | UGAGCCACA | | |
| AD-1423291 | GGCUCAAAGGAUA | 67 | 1024-1044 | UTUGAUAUUAUCC | 144 | 1022-1044 |
| | AUAUCAAA | | | UUUGAGCCAC | | |
| AD-1423292 | GCUCAAAGGAUAA | 68 | 1025-1045 | UTUUGATAUUATCC | 145 | 1023-1045 |
| | UAUCAAAA | | | UUUGAGCCA | | |
| AD-1423293 | CUCAAAGGAUAAU | 69 | 1026-1046 | UGUUTGAUAUUAU | 146 | 1024-1046 |
| | AUCAAACA | | | CCUUUGAGCC | | |
| AD-1423294 | UCAAAGGAUAAUA | 70 | 1027-1047 | UTGUTUGAUAUTAU | 147 | 1025-1047 |
| | UCAAACAA | | | CCUUUGAGC | | |
| AD-1423295 | CAAAGGAUAAUAU | 71 | 1028-1048 | UGUGTUTGAUATUA | 148 | 1026-1048 |
| | CAAACACA | | | UCCUUUGAG | | |
| AD-1423296 | AAAGGAUAAUAUC | 72 | 1029-1049 | UCGUGUTUGAUAU | 149 | 1027-1049 |
| | AAACACGA | | | UAUCCUUUGA | | |
| AD-1423297 | AAGGAUAAUAUCA | 73 | 1030-1050 | UACGTGTUUGATAU | 150 | 1028-1050 |
| | AACACGUA | | | UAUCCUUUG | | |
| AD-1423298 | AGGAUAAUAUCAA | 74 | 1031-1051 | UGACGUGUUUGAU | 151 | 1029-1051 |
| | ACACGUCA | | | AUUAUCCUUU | | |
| AD-1423299 | GGAUAAUAUCAAA | 75 | 1032-1052 | UGGACGTGUUUGA | 152 | 1030-1052 |
| | CACGUCCA | | | UAUUAUCCUU | | |
| AD-1423300 | GAUAAUAUCAAAC | 76 | 1033-1053 | UGGGACGUGUUTG | 153 | 1031-1053 |
| | ACGUCCCA | | | AUAUUAUCCU | | |
| AD-1397266 | AUAAUAUCAAACA | 77 | 1034-1054 | UCGGGACGUGUTU | 154 | 1032-1054 |
| | CGUCCCGA | | | GAUAUUAUCC | | |
| AD-1423301 | UAAUAUCAAACAC | 78 | 1035-1055 | UCCGGGACGUGTUU | 155 | 1033-1055 |
| | GUCCCGGA | | | GAUAUUAUC | | |
| AD-1397267 | UAAUAUCAAACAC | 79 | 1035-1055 | UCCGGGACGUGUU | 156 | 1033-1055 |
| | GUCCCGGA | | | UGAUAUUAUC | | |
| AD-1397268 | AAUAUCAAACACG | 80 | 1036-1056 | UCCCGGGACGUGU | 157 | 1034-1056 |
| | UCCCGGGA | | | UUGAUAUUAU | | |
| AD-1423302 | AUAUCAAACACGU | 81 | 1037-1057 | UTCCCGGGACGTGU | 158 | 1035-1057 |
| | CCCGGGAA | | | UUGAUAUUA | | |
| AD-1397269 | AUAUCAAACACGU | 82 | 1037-1057 | UUCCCGGGACGUG | 159 | 1035-1057 |
| | CCCGGGAA | | | UUUGAUAUUA | | |
| AD-1397270 | UAUCAAACACGUC | 83 | 1038-1058 | UCUCCCGGGACGUG | 160 | 1036-1058 |
| | CCGGGAGA | | | UUUGAUAUU | | |
| AD-1397271 | AUCAAACACGUCC | 84 | 1039-1059 | UCCUCCCGGGACGU | 161 | 1037-1059 |
| | CGGGAGGA | | | GUUUGAUAU | | |
| AD-1423303 | UCAAACACGUCCC | 85 | 1040-1060 | UGCCTCCCGGGACG | 162 | 1038-1060 |
| | GGGAGGCA | | | UGUUUGAUA | | |
| AD-1397272 | UCAAACACGUCCC | 86 | 1040-1060 | UGCCTCCCGGGACG | 163 | 1038-1060 |
| | GGGAGGCA | | | UGUUUGAUA | | |
| AD-1423304 | CAAACACGUCCCG | 87 | 1041-1061 | UCGCCUCCCGGGAC | 164 | 1039-1061 |
| | GGAGGCGA | | | GUGUUUGAU | | |
| AD-1397273 | CAAACACGUCCCG | 88 | 1041-1061 | UCGCCUCCCGGGAC | 165 | 1039-1061 |
| | GGAGGCGA | | | GUGUUUGAU | | |
| AD-1423305 | AAACACGUCCCGG | 89 | 1042-1062 | UCCGCCTCCCGGGA | 166 | 1040-1062 |
| | GAGGCGGA | | | CGUGUUUGA | | |
| AD-1397274 | AAACACGUCCCGG | 90 | 1042-1062 | UCCGCCTCCCGGGA | 167 | 1040-1062 |
| | GAGGCGGA | | | CGUGUUUGA | | |
| AD-1423306 | AACACGUCCCGGG | 91 | 1043-1063 | UGCCGCCUCCCGGG | 168 | 1041-1063 |
| | AGGCGGCA | | | ACGUGUUUG | | |
| AD-1397275 | AACACGUCCCGGG | 92 | 1043-1063 | UGCCGCCUCCCGGG | 169 | 1041-1063 |
| | AGGCGGCA | | | ACGUGUUUG | | |
| AD-1397276 | ACACGUCCCGGGA | 93 | 1044-1064 | UUGCCGCCUCCCGG | 170 | 1042-1064 |
| | GGCGGCAA | | | GACGUGUUU | | |
| AD-1397277 | CACGUCCCGGGAG | 94 | 1045-1065 | UCUGCCGCCUCCCG | 171 | 1043-1065 |
| | GCGGCAGA | | | GGACGUGUU | | |

TABLE 4
Modified Sense and Antisense Strand Sequences of MAPT Candidate dsRNA Agents
Targeting Exon 10

| | | SEQ | | SEQ | mRNA Target | SEQ |
|---|---|---|---|---|---|---|
| | Sense Sequence 5′ to | ID | Antisense Sequence 5′ | ID | Sequence | ID |
| Duplex ID | 3′ | NO: | to 3′ | NO: | 5′ to 3′ | NO: |
| AD-1423242 | gscsaga(Uhd)aaUfUfA | 172 | VPusdGscudTc(Tgn)uau | 249 | GUGCAGAUAAUUA | 326 |
| | fauaagaagcaL96 | | udAaUfuaucugcsasc | | AUAAGAAGCU | |
| AD-1423243 | csasgau(Ahd)auUfAfA | 173 | VPusdAsgcdTu(C2p)uua | 250 | UGCAGAUAAUUAA | 327 |
| | fuaagaagcuaL96 | | udTaAfuuaucugscsa | | UAAGAAGCUG | |
| AD-1423244 | asgsaua(Ahd)uuAfAfU | 174 | VPusdCsagdCudTcuuad | 251 | GCAGAUAAUUAAU | 328 |
| | faagaagcugaL96 | | TuAfauuaucusgsc | | AAGAAGCUGG | |
| AD-1423245 | gsasuaa(Uhd)uaAfUfA | 175 | VPusdCscadGc(Tgn)ucu | 252 | CAGAUAAUUAAUA | 329 |
| | fagaagcuggaL96 | | udAuUfaauuaucsusg | | AGAAGCUGGA | |
| AD-1423246 | asusaau(Uhd)aaUfAfA | 176 | VPusdTsccdAg(C2p)uuc | 253 | AGAUAAUUAAUAA | 330 |
| | fgaagcuggaaL96 | | udTaUfuaauuauscsu | | GAAGCUGGAU | |
| AD-1423247 | usasauu(Ahd)auAfAfG | 177 | VPusdAsucdCa(G2p)cuu | 254 | GAUAAUUAAUAAG | 331 |
| | faagcuggauaL96 | | cdTuAfuuaauuasusc | | AAGCUGGAUC | |
| AD-1423248 | asasuua(Ahd)uaAfGfA | 178 | VPusdGsaudCc(Agn)gcu | 255 | AUAAUUAAUAAGA | 332 |
| | fagcuggaucaL96 | | udCuUfauuaauusasu | | AGCUGGAUCU | |
| AD-1423249 | asusuaa(Uhd)aaGfAfA | 179 | VPusdAsgadTc(C2p)agc | 256 | UAAUUAAUAAGAA | 333 |
| | fgcuggaucuaL96 | | udTcUfuauuaaususa | | GCUGGAUCUU | |
| AD-1423250 | ususaau(Ahd)agAfAfG | 180 | VPusdAsagdAudCcagcd | 257 | AAUUAAUAAGAAG | 334 |
| | fcuggaucuuaL96 | | TuCfuuauuaasusu | | CUGGAUCUUA | |
| AD-1423251 | usasaua(Ahd)gaAfGfC | 181 | VPusdTsaadGa(Tgn)cca | 258 | AUUAAUAAGAAGC | 335 |
| | fuggaucuuaaL96 | | gdCuUfcuuauuasasu | | UGGAUCUUAG | |
| AD-1423252 | asasuaa(Ghd)aaGfCfUf | 182 | VPusdCsuadAg(Agn)ucc | 259 | UUAAUAAGAAGCU | 336 |
| | ggaucuuagaL96 | | adGcUfucuuauusasa | | GGAUCUUAGC | |
| AD-1423253 | asusaag(Ahd)agCfUfG | 183 | VPusdGscudAadGauccd | 260 | UAAUAAGAAGCUG | 337 |
| | fgaucuuagcaL96 | | AgCfuucuuaususa | | GAUCUUAGCA | |
| AD-1423254 | usasaga(Ahd)gcUfGfG | 184 | VPusdTsgcdTa(Agn)gau | 261 | AAUAAGAAGCUGG | 338 |
| | faucuuagcaaL96 | | cdCaGfcuucuuasusu | | AUCUUAGCAA | |
| AD-1423255 | asasgaa(Ghd)cuGfGfA | 185 | VPusdTsugdCu(Agn)aga | 262 | AUAAGAAGCUGGA | 339 |
| | fucuuagcaaaL96 | | udCcAfgcuucuusasu | | UCUUAGCAAC | |
| AD-1423256 | asgsaag(Chd)ugGfAfU | 186 | VPusdGsuudGc(Tgn)aag | 263 | UAAGAAGCUGGAU | 340 |
| | fcuuagcaacaL96 | | adTcCfagcuucususa | | CUUAGCAACG | |
| AD-1423257 | gsasagc(Uhd)ggAfUfC | 187 | VPusdCsgudTg(C2p)uaa | 264 | AAGAAGCUGGAUC | 341 |
| | fuuagcaacgaL96 | | gdAuCfcagcuucsusu | | UUAGCAACGU | |
| AD-1423258 | asasgcu(Ghd)gaUfCfU | 188 | VPusdAscgdTu(G2p)cua | 265 | AGAAGCUGGAUCU | 342 |
| | fuagcaacguaL96 | | adGaUfccagcuuscsu | | UAGCAACGUC | |
| AD-1423259 | asgscug(Ghd)auCfUfU | 189 | VPusdGsacdGudTgcuad | 266 | GAAGCUGGAUCUU | 343 |
| | fagcaacgucaL96 | | AgAfuccagcususc | | AGCAACGUCC | |
| AD-1423260 | gscsugg(Ahd)ucUfUfA | 190 | VPusdGsgadCgdTugcud | 267 | AAGCUGGAUCUUA | 344 |
| | fgcaacguccaL96 | | AaGfauccagcsusu | | GCAACGUCCA | |
| AD-1423261 | csusgga(Uhd)cuUfAfG | 191 | VPusdTsggdAc(G2p)uug | 268 | AGCUGGAUCUUAG | 345 |
| | fcaacguccaaL96 | | cdTaAfgauccagscsu | | CAACGUCCAG | |
| AD-1423262 | usgsgau(Chd)uuAfGfC | 192 | VPusdCsugdGadCguugd | 269 | GCUGGAUCUUAGC | 346 |
| | faacguccagaL96 | | CuAfagauccasgsc | | AACGUCCAGU | |
| AD-1423263 | gsgsauc(Uhd)uaGfCfA | 193 | VPusdAscudGg(Agn)cgu | 270 | CUGGAUCUUAGCA | 347 |
| | facguccaguaL96 | | udGcUfaagauccsasg | | ACGUCCAGUC | |
| AD-1423264 | gsasucu(Uhd)agCfAfA | 194 | VPusdGsacdTg(G2p)acg | 271 | UGGAUCUUAGCAA | 348 |
| | fcguccagucaL96 | | udTgCfuaagaucscsa | | CGUCCAGUCC | |
| AD-1423265 | asuscuu(Ahd)gcAfAfC | 195 | VPusdGsgadCu(G2p)gac | 272 | GGAUCUUAGCAAC | 349 |
| | fguccaguccaL96 | | gdTuGfcuaagauscsc | | GUCCAGUCCA | |
| AD-1423266 | uscsuua(Ghd)caAfCfG | 196 | VPusdTsggdAc(Tgn)gga | 273 | GAUCUUAGCAACG | 350 |
| | fuccaguccaaL96 | | cdGuUfgcuaagasusc | | UCCAGUCCAA | |
| AD-1423267 | csusuag(Chd)aaCfGfUf | 197 | VPusdTsugdGa(C2p)ugg | 274 | AUCUUAGCAACGU | 351 |
| | ccaguccaaaL96 | | adCgUfugcuaagsasu | | CCAGUCCAAG | |
| AD-1423268 | ususagc(Ahd)acGfUfC | 198 | VPusdCsuudGg(Agn)cug | 275 | UCUUAGCAACGUC | 352 |
| | fcaguccaagaL96 | | gdAcGfuugcuaasgsa | | CAGUCCAAGU | |
| AD-1423269 | usasgca(Ahd)cgUfCfCf | 199 | VPusdAscudTg(G2p)acu | 276 | CUUAGCAACGUCC | 353 |
| | aguccaaguaL96 | | gdGaCfguugcuasasg | | AGUCCAAGUG | |
| AD-1423270 | asgscaa(Chd)guCfCfAf | 200 | VPusdCsacdTu(G2p)gac | 277 | UUAGCAACGUCCA | 354 |
| | guccaagugaL96 | | udGgAfcguugcusasa | | GUCCAAGUGU | |
| AD-1423271 | gscsaac(Ghd)ucCfAfGf | 201 | VPusdAscadCudTggacd | 278 | UAGCAACGUCCAG | 355 |
| | uccaaguguaL96 | | TgGfacguugcsusa | | UCCAAGUGUG | |
| AD-1423272 | csasacg(Uhd)ccAfGfUf | 202 | VPusdCsacdAcdTuggad | 279 | AGCAACGUCCAGU | 356 |
| | ccaagugugaL96 | | CuGfgacguugscsu | | CCAAGUGUGG | |
| AD-1423273 | asascgu(Chd)caGfUfCf | 203 | VPusdCscadCadCuuggd | 280 | GCAACGUCCAGUC | 357 |
| | caaguguggaL96 | | AcUfggacguusgsc | | CAAGUGUGGC | |
| AD-1423274 | ascsguc(Chd)agUfCfCf | 204 | VPusdGsccdAc(Agn)cuu | 281 | CAACGUCCAGUCC | 358 |
| | aaguguggcaL96 | | gdGaCfuggacgususg | | AAGUGUGGCU | |
| AD-1423275 | csgsucc(Ahd)guCfCfA | 205 | VPusdAsgcdCa(C2p)acu | 282 | AACGUCCAGUCCA | 359 |
| | faguguggcual96 | | udGgAfcuggacgsusu | | AGUGUGGCUC | |
| AD-1423276 | gsuscca(Ghd)ucCfAfA | 206 | VPusdGsagdCc(Agn)cac | 283 | ACGUCCAGUCCAA | 360 |
| | fguguggcucaL96 | | udTgGfacuggacsgsu | | GUGUGGCUCA | |
| AD-1423277 | uscscag(Uhd)ccAfAfG | 207 | VPusdTsgadGc(C2p)aca | 284 | CGUCCAGUCCAAG | 361 |
| | fuguggcucaaL96 | | cdTuGfgacuggascsg | | UGUGGCUCAA | |
| AD-1423278 | cscsagu(Chd)caAfGfUf | 208 | VPusdTsugdAg(C2p)cac | 285 | GUCCAGUCCAAGU | 362 |
| | guggcucaaaL96 | | adCuUfggacuggsasc | | GUGGCUCAAA | |
| AD-1423279 | csasguc(Chd)aaGfUfGf | 209 | VPusdTsuudGa(G2p)cca | 286 | UCCAGUCCAAGUG | 363 |
| | uggcucaaaaL96 | | cdAcUfuggacugsgsa | | UGGCUCAAAG | |
| AD-1423280 | asgsucc(Ahd)agUfGfU | 210 | VPusdCsuudTg(Agn)gcc | 287 | CCAGUCCAAGUGU | 364 |
| | fggcucaaagaL96 | | adCaCfuuggacusgsg | | GGCUCAAAGG | |
| AD-1423281 | gsuscca(Ahd)guGfUfG | 211 | VPusdCscudTudGagccd | 288 | CAGUCCAAGUGUG | 365 |
| | fgcucaaaggaL96 | | AcAfcuuggacsusg | | GCUCAAAGGA | |
| AD-1423282 | uscscaa(Ghd)ugUfGfG | 212 | VPusdTsccdTudTgagcd | 289 | AGUCCAAGUGUGG | 366 |
| | fcucaaaggaaL96 | | CaCfacuuggascsu | | CUCAAAGGAU | |
| AD-1423283 | cscsaag(Uhd)guGfGfC | 213 | VPusdAsucdCudTugagd | 290 | GUCCAAGUGUGGC | 367 |
| | fucaaaggauaL96 | | CcAfcacuuggsasc | | UCAAAGGAUA | |
| AD-1423284 | csasagu(Ghd)ugGfCfU | 214 | VPusdTsaudCc(Tgn)uug | 291 | UCCAAGUGUGGCU | 368 |
| | fcaaaggauaaL96 | | adGcCfacacuugsgsa | | CAAAGGAUAA | |
| AD-1423285 | asasgug(Uhd)ggCfUfC | 215 | VPusdTsuadTc(C2p)uuu | 292 | CCAAGUGUGGCUC | 369 |
| | faaaggauaaaL96 | | gdAgCfcacacuusgsg | | AAAGGAUAAU | |
| AD-1423286 | asgsugu(Ghd)gcUfCfA | 216 | VPusdAsuudAu(C2p)cuu | 293 | CAAGUGUGGCUCA | 370 |
| | faaggauaauaL96 | | udGaGfccacacususg | | AAGGAUAAUA | |
| AD-1423287 | gsusgug(Ghd)cuCfAfA | 217 | VPusdTsaudTa(Tgn)ccu | 294 | AAGUGUGGCUCAA | 371 |
| | faggauaauaaL96 | | udTgAfgccacacsusu | | AGGAUAAUAU | |
| AD-1423288 | usgsugg(Chd)ucAfAfA | 218 | VPusdAsuadTu(Agn)ucc | 295 | AGUGUGGCUCAAA | 372 |
| | fggauaauauaL96 | | udTuGfagccacascsu | | GGAUAAUAUC | |
| AD-1423289 | gsusggc(Uhd)caAfAfG | 219 | VPusdGsaudAudTauccd | 296 | GUGUGGCUCAAAG | 373 |
| | fgauaauaucaL96 | | TuUfgagccacsasc | | GAUAAUAUCA | |
| AD-1423290 | usgsgcu(Chd)aaAfGfG | 220 | VPusdTsgadTa(Tgn)uau | 297 | UGUGGCUCAAAGG | 374 |
| | fauaauaucaaL96 | | cdCuUfugagccascsa | | AUAAUAUCAA | |
| AD-1423291 | gsgscuc(Ahd)aaGfGfA | 221 | VPusdTsugdAudAuuaud | 298 | GUGGCUCAAAGGA | 375 |
| | fuaauaucaaaL96 | | CcUfuugagccsasc | | UAAUAUCAAA | |
| AD-1423292 | gscsuca(Ahd)agGfAfU | 222 | VPusdTsuudGa(Tgn)auu | 299 | UGGCUCAAAGGAU | 376 |
| | faauaucaaaaL96 | | adTcCfuuugagcscsa | | AAUAUCAAAC | |
| AD-1423293 | csuscaa(Ahd)ggAfUfA | 223 | VPusdGsuudTg(Agn)uau | 300 | GGCUCAAAGGAUA | 377 |
| | fauaucaaacaL96 | | udAuCfcuuugagscsc | | AUAUCAAACA | |
| AD-1423294 | uscsaaa(Ghd)gaUfAfA | 224 | VPusdTsgudTu(G2p)aua | 301 | GCUCAAAGGAUAA | 378 |
| | fuaucaaacaaL96 | | udTaUfccuuugasgsc | | UAUCAAACAC | |
| AD-1423295 | csasaag(Ghd)auAfAfU | 225 | VPusdGsugdTu(Tgn)gau | 302 | CUCAAAGGAUAAU | 379 |
| | faucaaacacaL96 | | adTuAfuccuuugsasg | | AUCAAACACG | |
| AD-1423296 | asasagg(Ahd)uaAfUfA | 226 | VPusdCsgudGu(Tgn)uga | 303 | UCAAAGGAUAAUA | 380 |
| | fucaaacacgaL96 | | udAuUfauccuuusgsa | | UCAAACACGU | |
| AD-1423297 | asasgga(Uhd)aaUfAfU | 227 | VPusdAscgdTg(Tgn)uug | 304 | CAAAGGAUAAUAU | 381 |
| | fcaaacacguaL96 | | adTaUfuauccuususg | | CAAACACGUC | |
| AD-1423298 | asgsgau(Ahd)auAfUfC | 228 | VPusdGsacdGu(G2p)uuu | 305 | AAAGGAUAAUAUC | 382 |
| | faaacacgucaL96 | | gdAuAfuuauccususu | | AAACACGUCC | |
| AD-1423299 | gsgsaua(Ahd)uaUfCfA | 229 | VPusdGsgadCgdTguuud | 306 | AAGGAUAAUAUCA | 383 |
| | faacacguccaL96 | | GaUfauuauccsusu | | AACACGUCCC | |
| AD-1423300 | gsasuaa(Uhd)auCfAfA | 230 | VPusdGsggdAc(G2p)ug | 307 | AGGAUAAUAUCAA | 384 |
| | facacgucccaL96 | | uudTgAfuauuaucscsu | | ACACGUCCCG | |
| AD-1397266 | asusaau(Ahd)ucAfAfA | 231 | VPusdCsggdGadCgugud | 308 | GGAUAAUAUCAAA | 385 |
| | fcacgucccgaL96 | | TuGfauauuauscsc | | CACGUCCCGG | |
| AD-1423301 | usasaua(Uhd)caAfAfCf | 232 | VPusdCscgdGg(Agn)cgu | 309 | GAUAAUAUCAAAC | 386 |
| | acgucccggaL96 | | gdTuUfgauauuasusc | | ACGUCCCGGG | |
| AD-1397267 | usasaua(Uhd)caAfAfCf | 233 | VPusCfscgdGg(Agn)cgu | 310 | GAUAAUAUCAAAC | 387 |
| | acgucccggaL96 | | guuUfgAfuauuasusc | | ACGUCCCGGG | |
| AD-1397268 | asasuau(Chd)aaAfCfAf | 234 | VPusdCsccdGgdGacgud | 311 | AUAAUAUCAAACA | 388 |
| | cgucccgggaL96 | | GuUfugauauusasu | | CGUCCCGGGA | |
| AD-1423302 | asusauc(Ahd)aaCfAfCf | 235 | VPusdTsccdCg(G2p)gac | 312 | UAAUAUCAAACAC | 389 |
| | gucccgggaaL96 | | gdTgUfuugauaususa | | GUCCCGGGAG | |
| AD-1397269 | asusauc(Ahd)aaCfAfCf | 236 | VPusUfsccdCg(G2p)gac | 313 | UAAUAUCAAACAC | 390 |
| | gucccgggaaL96 | | gugUfuUfgauaususa | | GUCCCGGGAG | |
| AD-1397270 | usasuca(Ahd)acAfCfGf | 237 | VPusdCsucdCcdGggacd | 314 | AAUAUCAAACACG | 391 |
| | ucccgggagaL96 | | GuGfuuugauasusu | | UCCCGGGAGG | |
| AD-1397271 | asuscaa(Ahd)caCfGfUf | 238 | VPusdCscudCcdCgggad | 315 | AUAUCAAACACGU | 392 |
| | cccgggaggaL96 | | CgUfguuugausasu | | CCCGGGAGGC | |
| AD-1423303 | uscsaaa(Chd)acGfUfCf | 239 | VPusdGsccdTc(C2p)cgg | 316 | UAUCAAACACGUC | 393 |
| | ccgggaggcaL96 | | gdAcGfuguuugasusa | | CCGGGAGGCG | |
| AD-1397272 | uscsaaa(Chd)acGfUfCf | 240 | VPusGfsccdTc(C2p)cgg | 317 | UAUCAAACACGUC | 394 |
| | ccgggaggcaL96 | | gacGfuGfuuugasusa | | CCGGGAGGCG | |
| AD-1423304 | csasaac(Ahd)cgUfCfCf | 241 | VPusdCsgcdCu(C2p)ccg | 318 | AUCAAACACGUCC | 395 |
| | cgggaggcgaL96 | | gdGaCfguguuugsasu | | CGGGAGGCGG | |
| AD-1397273 | csasaac(Ahd)cgUfCfCf | 242 | VPusCfsgcdCu(C2p)ccg | 319 | AUCAAACACGUCC | 396 |
| | cgggaggcgaL96 | | ggaCfgUfguuugsasu | | CGGGAGGCGG | |
| AD-1423305 | asasaca(Chd)guCfCfCf | 243 | VPusdCscgdCc(Tgn)ccc | 320 | UCAAACACGUCCC | 397 |
| | gggaggcggaL96 | | gdGgAfcguguuusgsa | | GGGAGGCGGC | |
| AD-1397274 | asasaca(Chd)guCfCfCf | 244 | VPusCfscgdCc(Tgn)cccg | 321 | UCAAACACGUCCC | 398 |
| | gggaggcggaL96 | | ggAfcGfuguuusgsa | | GGGAGGCGGC | |
| AD-1423306 | asascac(Ghd)ucCfCfGf | 245 | VPusdGsccdGc(C2p)ucc | 322 | CAAACACGUCCCG | 399 |
| | ggaggcggcaL96 | | cdGgGfacguguususg | | GGAGGCGGCA | |
| AD-1397275 | asascac(Ghd)ucCfCfGf | 246 | VPusGfsccdGc(C2p)ucc | 323 | CAAACACGUCCCG | 400 |
| | ggaggcggcaL96 | | cggGfaCfguguususg | | GGAGGCGGCA | |
| AD-1397276 | ascsacg(Uhd)ccCfGfGf | 247 | VPusUfsgcdCg(C2p)cuc | 324 | AAACACGUCCCGG | 401 |
| | gaggcggcaaL96 | | ccgGfgAfcgugususu | | GAGGCGGCAG | |
| AD-1397277 | csascgu(Chd)ccGfGfGf | 248 | VPusdCsugdCcdGccucd | 325 | AACACGUCCCGGG | 402 |
| | aggcggcagaL96 | | CcGfggacgugsusu | | AGGCGGCAGU | |

TABLE 5
Modified Sense and Antisense Strand Sequences of Additional MAPT dsRNA Agents

| | | SEQ | | SEQ | mRNA Target | SEQ |
|---|---|---|---|---|---|---|
| | Sense Sequence 5′ to | ID | Antisense Sequence 5′ | ID | Sequence | ID |
| Duplex ID | 3′ | NO: | to 3′ | NO: | 5′ to 3′ | NO: |
| AD-2204844 | usasaua(Uhd)caAfAfCf | 403 | VPusCfscgdGg(Agn)cgu | 459 | GAUAAUAUCAAAC | 515 |
| | acgucccgsgsa | | guuUfgAfuauuasusc | | ACGUCCCGGG | |
| AD-2204845 | asusauc(Ahd)aaCfAfCf | 404 | VPusUfsccdCg(G2p)gac | 460 | UAAUAUCAAACAC | 516 |
| | gucccgggsasa | | gugUfuUfgauaususa | | GUCCCGGGAG | |
| AD-2204846 | uscsaaa(Chd)acGfUfCf | 405 | VPusGfsccdTc(C2p)cgg | 461 | UAUCAAACACGUC | 517 |
| | ccgggaggscsa | | gacGfuGfuuugasusa | | CCGGGAGGCG | |
| AD-2204847 | csasaac(Ahd)cgUfCfCf | 406 | VPusCfsgcdCu(C2p)ccg | 462 | AUCAAACACGUCC | 518 |
| | cgggaggcsgsa | | ggaCfgUfguuugsasu | | CGGGAGGCGG | |
| AD-2204848 | asasaca(Chd)guCfCfCf | 407 | VPusCfscgdCc(Tgn)cccg | 463 | UCAAACACGUCCC | 519 |
| | gggaggcgsgsa | | ggAfcGfuguuusgsa | | GGGAGGCGGC | |
| AD-2204849 | asascac(Ghd)ucCfCfGf | 408 | VPusGfsccdGc(C2p)ucc | 464 | CAAACACGUCCCG | 520 |
| | ggaggcggscsa | | cggGfaCfguguususg | | GGAGGCGGCA | |
| AD-2204850 | ascsacg(Uhd)ccCfGfGf | 409 | VPusUfsgcdCg(C2p)cuc | 465 | AAACACGUCCCGG | 521 |
| | gaggcggcsasa | | ccgGfgAfcgugususu | | GAGGCGGCAG | |
| AD-2204851 | csascgu(Chd)ccGfGfGf | 410 | VPusdCsugdCcdGccucd | 466 | AACACGUCCCGGG | 522 |
| | aggcggcasgsa | | CcGfggacgugsusu | | AGGCGGCAGU | |
| AD-2204852 | gscsaga(Uhd)aaUfUfA | 411 | VPusdGscudTc(Tgn)uau | 467 | GUGCAGAUAAUUA | 523 |
| | fauaagaagscsa | | udAaUfuaucugcsasc | | AUAAGAAGCU | |
| AD-2204853 | csasgau(Ahd)auUfAfA | 412 | VPusdAsgcdTu(C2p)uua | 468 | UGCAGAUAAUUAA | 524 |
| | fuaagaagcsusa | | udTaAfuuaucugscsa | | UAAGAAGCUG | |
| AD-2204854 | gsasuaa(Uhd)uaAfUfA | 413 | VPusdCscadGc(Tgn)ucu | 469 | CAGAUAAUUAAUA | 525 |
| | fagaagcugsgsa | | udAuUfaauuaucsusg | | AGAAGCUGGA | |
| AD-2204855 | asusaau(Uhd)aaUfAfA | 414 | VPusdTsccdAg(C2p)uuc | 470 | AGAUAAUUAAUAA | 526 |
| | fgaagcuggsasa | | udTaUfuaauuauscsu | | GAAGCUGGAU | |
| AD-2204856 | usasauu(Ahd)auAfAfG | 415 | VPusdAsucdCa(G2p)cuu | 471 | GAUAAUUAAUAAG | 527 |
| | faagcuggasusa | | cdTuAfuuaauuasusc | | AAGCUGGAUC | |
| AD-2204857 | asasuua(Ahd)uaAfGfA | 416 | VPusdGsaudCc(Agn)gcu | 472 | AUAAUUAAUAAGA | 528 |
| | fagcuggauscsa | | udCuUfauuaauusasu | | AGCUGGAUCU | |
| AD-2204858 | asusuaa(Uhd)aaGfAfA | 417 | VPusdAsgadTc(C2p)agc | 473 | UAAUUAAUAAGAA | 529 |
| | fgcuggaucsusa | | udTcUfuauuaaususa | | GCUGGAUCUU | |
| AD-2204859 | usasaua(Ahd)gaAfGfC | 418 | VPusdTsaadGa(Tgn)cca | 474 | AUUAAUAAGAAGC | 530 |
| | fuggaucuusasa | | gdCuUfcuuauuasasu | | UGGAUCUUAG | |
| AD-2204860 | asasuaa(Ghd)aaGfCfUf | 419 | VPusdCsuadAg(Agn)ucc | 475 | UUAAUAAGAAGCU | 531 |
| | ggaucuuasgsa | | adGcUfucuuauusasa | | GGAUCUUAGC | |
| AD-2204861 | usasaga(Ahd)gcUfGfG | 420 | VPusdTsgcdTa(Agn)gau | 476 | AAUAAGAAGCUGG | 532 |
| | faucuuagcsasa | | cdCaGfcuucuuasusu | | AUCUUAGCAA | |
| AD-2204862 | asasgaa(Ghd)cuGfGfA | 421 | VPusdTsugdCu(Agn)aga | 477 | AUAAGAAGCUGGA | 533 |
| | fucuuagcasasa | | udCcAfgcuucuusasu | | UCUUAGCAAC | |
| AD-2204863 | asgsaag(Chd)ugGfAfU | 422 | VPusdGsuudGc(Tgn)aag | 478 | UAAGAAGCUGGAU | 534 |
| | fcuuagcaascsa | | adTcCfagcuucususa | | CUUAGCAACG | |
| AD-2204864 | gsasagc(Uhd)ggAfUfC | 423 | VPusdCsgudTg(C2p)uaa | 479 | AAGAAGCUGGAUC | 535 |
| | fuuagcaacsgsa | | gdAuCfcagcuucsusu | | UUAGCAACGU | |
| AD-2204865 | asasgcu(Ghd)gaUfCfU | 424 | VPusdAscgdTu(G2p)cua | 480 | AGAAGCUGGAUCU | 536 |
| | fuagcaacgsusa | | adGaUfccagcuuscsu | | UAGCAACGUC | |
| AD-2204866 | csusgga(Uhd)cuUfAfG | 425 | VPusdTsggdAc(G2p)uug | 481 | AGCUGGAUCUUAG | 537 |
| | fcaacguccsasa | | cdTaAfgauccagscsu | | CAACGUCCAG | |
| AD-2204867 | gsgsauc(Uhd)uaGfCfA | 426 | VPusdAscudGg(Agn)cgu | 482 | CUGGAUCUUAGCA | 538 |
| | facguccagsusa | | udGcUfaagauccsasg | | ACGUCCAGUC | |
| AD-2204868 | gsasucu(Uhd)agCfAfA | 427 | VPusdGsacdTg(G2p)acg | 483 | UGGAUCUUAGCAA | 539 |
| | fcguccaguscsa | | udTgCfuaagaucscsa | | CGUCCAGUCC | |
| AD-2204869 | asuscuu(Ahd)gcAfAfC | 428 | VPusdGsgadCu(G2p)gac | 484 | GGAUCUUAGCAAC | 540 |
| | fguccagucscsa | | gdTuGfcuaagauscsc | | GUCCAGUCCA | |
| AD-2204870 | uscsuua(Ghd)caAfCfG | 429 | VPusdTsggdAc(Tgn)gga | 485 | GAUCUUAGCAACG | 541 |
| | fuccaguccsasa | | cdGuUfgcuaagasusc | | UCCAGUCCAA | |
| AD-2204871 | csusuag(Chd)aaCfGfUf | 430 | VPusdTsugdGa(C2p)ugg | 486 | AUCUUAGCAACGU | 542 |
| | ccaguccasasa | | adCgUfugcuaagsasu | | CCAGUCCAAG | |
| AD-2204872 | ususagc(Ahd)acGfUfC | 431 | VPusdCsuudGg(Agn)cug | 487 | UCUUAGCAACGUC | 543 |
| | fcaguccaasgsa | | gdAcGfuugcuaasgsa | | CAGUCCAAGU | |
| AD-2204873 | usasgca(Ahd)cgUfCfCf | 432 | VPusdAscudTg(G2p)acu | 488 | CUUAGCAACGUCC | 544 |
| | aguccaagsusa | | gdGaCfguugcuasasg | | AGUCCAAGUG | |
| AD-2204874 | asgscaa(Chd)guCfCfAf | 433 | VPusdCsacdTu(G2p)gac | 489 | UUAGCAACGUCCA | 545 |
| | guccaagusgsa | | udGgAfcguugcusasa | | GUCCAAGUGU | |
| AD-2204875 | ascsguc(Chd)agUfCfCf | 434 | VPusdGsccdAc(Agn)cuu | 490 | CAACGUCCAGUCC | 546 |
| | aaguguggscsa | | gdGaCfuggacgususg | | AAGUGUGGCU | |
| AD-2204876 | csgsucc(Ahd)guCfCfA | 435 | VPusdAsgcdCa(C2p)acu | 491 | AACGUCCAGUCCA | 547 |
| | faguguggcsusa | | udGgAfcuggacgsusu | | AGUGUGGCUC | |
| AD-2204877 | gsuscca(Ghd)ucCfAfA | 436 | VPusdGsagdCc(Agn)cac | 492 | ACGUCCAGUCCAA | 548 |
| | fguguggcuscsa | | udTgGfacuggacsgsu | | GUGUGGCUCA | |
| AD-2204878 | uscscag(Uhd)ccAfAfG | 437 | VPusdTsgadGc(C2p)aca | 493 | CGUCCAGUCCAAG | 549 |
| | fuguggcucsasa | | cdTuGfgacuggascsg | | UGUGGCUCAA | |
| AD-2204879 | cscsagu(Chd)caAfGfUf | 438 | VPusdTsugdAg(C2p)cac | 494 | GUCCAGUCCAAGU | 550 |
| | guggcucasasa | | adCuUfggacuggsasc | | GUGGCUCAAA | |
| AD-2204880 | csasguc(Chd)aaGfUfGf | 439 | VPusdTsuudGa(G2p)cca | 495 | UCCAGUCCAAGUG | 551 |
| | uggcucaasasa | | cdAcUfuggacugsgsa | | UGGCUCAAAG | |
| AD-2204881 | asgsucc(Ahd)agUfGfU | 440 | VPusdCsuudTg(Agn)gcc | 496 | CCAGUCCAAGUGU | 552 |
| | fggcucaaasgsa | | adCaCfuuggacusgsg | | GGCUCAAAGG | |
| AD-2204882 | csasagu(Ghd)ugGfCfU | 441 | VPusdTsaudCc(Tgn)uug | 497 | UCCAAGUGUGGCU | 553 |
| | fcaaaggausasa | | adGcCfacacuugsgsa | | CAAAGGAUAA | |
| AD-2204883 | asasgug(Uhd)ggCfUfC | 442 | VPusdTsuadTc(C2p)uuu | 498 | CCAAGUGUGGCUC | 554 |
| | faaaggauasasa | | gdAgCfcacacuusgsg | | AAAGGAUAAU | |
| AD-2204884 | asgsugu(Ghd)gcUfCfA | 443 | VPusdAsuudAu(C2p)cuu | 499 | CAAGUGUGGCUCA | 555 |
| | faaggauaasusa | | udGaGfccacacususg | | AAGGAUAAUA | |
| AD-2204885 | gsusgug(Ghd)cuCfAfA | 444 | VPusdTsaudTa(Tgn)ccu | 500 | AAGUGUGGCUCAA | 556 |
| | faggauaausasa | | udTgAfgccacacsusu | | AGGAUAAUAU | |
| AD-2204886 | usgsugg(Chd)ucAfAfA | 445 | VPusdAsuadTu(Agn)ucc | 501 | AGUGUGGCUCAAA | 557 |
| | fggauaauasusa | | udTuGfagccacascsu | | GGAUAAUAUC | |
| AD-2204887 | usgsgcu(Chd)aaAfGfG | 446 | VPusdTsgadTa(Tgn)uau | 502 | UGUGGCUCAAAGG | 558 |
| | fauaauaucsasa | | cdCuUfugagccascsa | | AUAAUAUCAA | |
| AD-2204888 | gscsuca(Ahd)agGfAfU | 447 | VPusdTsuudGa(Tgn)auu | 503 | UGGCUCAAAGGAU | 559 |
| | faauaucaasasa | | adTcCfuuugagcscsa | | AAUAUCAAAC | |
| AD-2204889 | csuscaa(Ahd)ggAfUfA | 448 | VPusdGsuudTg(Agn)uau | 504 | GGCUCAAAGGAUA | 560 |
| | fauaucaaascsa | | udAuCfcuuugagscsc | | AUAUCAAACA | |
| AD-2204890 | asasagg(Ahd)uaAfUfA | 449 | VPusdCsgudGu(Tgn)uga | 505 | UCAAAGGAUAAUA | 561 |
| | fucaaacacsgsa | | udAuUfauccuuusgsa | | UCAAACACGU | |
| AD-2204891 | asasgga(Uhd)aaUfAfU | 450 | VPusdAscgdTg(Tgn)uug | 506 | CAAAGGAUAAUAU | 562 |
| | fcaaacacgsusa | | adTaUfuauccuususg | | CAAACACGUC | |
| AD-2204892 | asgsgau(Ahd)auAfUfC | 451 | VPusdGsacdGu(G2p)uuu | 507 | AAAGGAUAAUAUC | 563 |
| | faaacacguscsa | | gdAuAfuuauccususu | | AAACACGUCC | |
| AD-2204893 | gsasuaa(Uhd)auCfAfA | 452 | VPusdGsggdAc(G2p)ug | 508 | AGGAUAAUAUCAA | 564 |
| | facacguccscsa | | uudTgAfuauuaucscsu | | ACACGUCCCG | |
| AD-2204894 | usasaua(Uhd)caAfAfCf | 453 | VPusdCscgdGg(Agn)cgu | 509 | GAUAAUAUCAAAC | 565 |
| | acgucccgsgsa | | gdTuUfgauauuasusc | | ACGUCCCGGG | |
| AD-2204895 | asusauc(Ahd)aaCfAfCf | 454 | VPusdTsccdCg(G2p)gac | 510 | UAAUAUCAAACAC | 566 |
| | gucccgggsasa | | gdTgUfuugauaususa | | GUCCCGGGAG | |
| AD-2204896 | uscsaaa(Chd)acGfUfCf | 455 | VPusdGsccdTc(C2p)cgg | 511 | UAUCAAACACGUC | 567 |
| | ccgggaggscsa | | gdAcGfuguuugasusa | | CCGGGAGGCG | |
| AD-2204897 | csasaac(Ahd)cgUfCfCf | 456 | VPusdCsgcdCu(C2p)ccg | 512 | AUCAAACACGUCC | 568 |
| | cgggaggcsgsa | | gdGaCfguguuugsasu | | CGGGAGGCGG | |
| AD-2204898 | asasaca(Chd)guCfCfCf | 457 | VPusdCscgdCc(Tgn)ccc | 513 | UCAAACACGUCCC | 569 |
| | gggaggcgsgsa | | gdGgAfcguguuusgsa | | GGGAGGCGGC | |
| AD-2204899 | asascac(Ghd)ucCfCfGf | 458 | VPusdGsccdGc(C2p)ucc | 514 | CAAACACGUCCCG | 570 |
| | ggaggcggscsa | | cdGgGfacguguususg | | GGAGGCGGCA | |
| AD-1597085 | asgsaua(Ahd)uuAfAfU | 575 | VPusdCsagdCudTcuuad | 596 | GCAGAUAAUUAAU | 617 |
| | faagaagcusgsa | | TuAfauuaucusgsc | | AAGAAGCUGG | |
| AD-1597086 | ususaau(Ahd)agAfAfG | 576 | VPusdAsagdAudCcagcd | 597 | AAUUAAUAAGAAG | 618 |
| | fcuggaucususa | | TuCfuuauuaasusu | | CUGGAUCUUA | |
| AD-1597137 | asusaag(Ahd)agCfUfG | 577 | VPusdGscudAadGauccd | 598 | UAAUAAGAAGCUG | 619 |
| | fgaucuuagscsa | | AgCfuucuuaususa | | GAUCUUAGCA | |
| AD-1597138 | asgscug(Ghd)auCfUfU | 578 | VPusdGsacdGudTgcuad | 599 | GAAGCUGGAUCUU | 620 |
| | fagcaacguscsa | | AgAfuccagcususc | | AGCAACGUCC | |
| AD-1597139 | gscsugg(Ahd)ucUfUfA | 579 | VPusdGsgadCgdTugcud | 600 | AAGCUGGAUCUUA | 621 |
| | fgcaacgucscsa | | AaGfauccagcsusu | | GCAACGUCCA | |
| AD-1597140 | usgsgau(Chd)uuAfGfC | 580 | VPusdCsugdGadCguugd | 601 | GCUGGAUCUUAGC | 622 |
| | faacguccasgsa | | CuAfagauccasgsc | | AACGUCCAGU | |
| AD-1597141 | gscsaac(Ghd)ucCfAfGf | 581 | VPusdAscadCudTggacd | 602 | UAGCAACGUCCAG | 623 |
| | uccaagugsusa | | TgGfacguugcsusa | | UCCAAGUGUG | |
| AD-1597142 | csasacg(Uhd)ccAfGfUf | 582 | VPusdCsacdAcdTuggad | 603 | AGCAACGUCCAGU | 624 |
| | ccaagugusgsa | | CuGfgacguugscsu | | CCAAGUGUGG | |
| AD-1597143 | asascgu(Chd)caGfUfCf | 583 | VPusdCscadCadCuuggd | 604 | GCAACGUCCAGUC | 625 |
| | caagugugsgsa | | AcUfggacguusgsc | | CAAGUGUGGC | |
| AD-1597144 | gsuscca(Ahd)guGfUfG | 584 | VPusdCscudTudGagccd | 605 | CAGUCCAAGUGUG | 626 |
| | fgcucaaagsgsa | | AcAfcuuggacsusg | | GCUCAAAGGA | |
| AD-1597145 | uscscaa(Ghd)ugUfGfG | 585 | VPusdTsccdTudTgagcd | 606 | AGUCCAAGUGUGG | 627 |
| | fcucaaaggsasa | | CaCfacuuggascsu | | CUCAAAGGAU | |
| AD-1597146 | cscsaag(Uhd)guGfGfC | 586 | VPusdAsucdCudTugagd | 607 | GUCCAAGUGUGGC | 628 |
| | fucaaaggasusa | | CcAfcacuuggsasc | | UCAAAGGAUA | |
| AD-1597147 | gsusggc(Uhd)caAfAfG | 587 | VPusdGsaudAudTauccd | 608 | GUGUGGCUCAAAG | 629 |
| | fgauaauauscsa | | TuUfgagccacsasc | | GAUAAUAUCA | |
| AD-1597148 | gsgscuc(Ahd)aaGfGfA | 588 | VPusdTsugdAudAuuaud | 609 | GUGGCUCAAAGGA | 630 |
| | fuaauaucasasa | | CcUfuugagccsasc | | UAAUAUCAAA | |
| AD-1597149 | gsgsaua(Ahd)uaUfCfA | 589 | VPusdGsgadCgdTguuud | 610 | AAGGAUAAUAUCA | 631 |
| | faacacgucscsa | | GaUfauuauccsusu | | AACACGUCCC | |
| AD-1597150 | asusaau(Ahd)ucAfAfA | 590 | VPusdCsggdGadCgugud | 611 | GGAUAAUAUCAAA | 632 |
| | fcacgucccsgsa | | TuGfauauuauscsc | | CACGUCCCGG | |
| AD-1597151 | asasuau(Chd)aaAfCfAf | 591 | VPusdCsccdGgdGacgud | 612 | AUAAUAUCAAACA | 633 |
| | cgucccggsgsa | | GuUfugauauusasu | | CGUCCCGGGA | |
| AD-1597152 | usasuca(Ahd)acAfCfGf | 592 | VPusdCsucdCcdGggacd | 613 | AAUAUCAAACACG | 634 |
| | ucccgggasgsa | | GuGfuuugauasusu | | UCCCGGGAGG | |
| AD-1597153 | asuscaa(Ahd)caCfGfUf | 593 | VPusdCscudCcdCgggad | 614 | AUAUCAAACACGU | 635 |
| | cccgggagsgsa | | CgUfguuugausasu | | CCCGGGAGGC | |
| AD-2126092 | uscsaaa(Ghd)gaUfAfA | 594 | VPusdTsgudTu(G2p)aua | 615 | GCUCAAAGGAUAA | 636 |
| | fuaucaaacsasa | | udTaUfccuuugasgsc | | UAUCAAACAC | |
| AD-2126093 | csasaag(Ghd)auAfAfU | 595 | VPusdGsugdTu(Tgn)gau | 616 | CUCAAAGGAUAAU | 637 |
| | faucaaacascsa | | adTuAfuccuuugsasg | | AUCAAACACG | |

TABLE 6
Single Dose Screens in BE(2)C Cells

| | 10 nM Dose | | 1 nM Dose | | 0.1 nM Dose | |
|---|---|---|---|---|---|---|
| | Avg % | | Avg % | | Avg % | |
| | MAPT | | MAPT | | MAPT | |
| | mRNA | | mRNA | | mRNA | |
| Duplex | Remaining | SD | Remaining | SD | Remaining | SD |
| AD-1423242.1 | 130 | 30 | 96 | 27 | 84 | 15 |
| AD-1423243.1 | 76 | 17 | 89 | 20 | 90 | 20 |
| AD-1423244.1 | 85 | 8 | 90 | 26 | 90 | 10 |
| AD-1423245.1 | 86 | 23 | 79 | 15 | 86 | 9 |
| AD-1423246.1 | 83 | 8 | 85 | 27 | 83 | 10 |
| AD-1423247.1 | 81 | 16 | 97 | 25 | 94 | 9 |
| AD-1423248.1 | 90 | 21 | 84 | 24 | 91 | 16 |
| AD-1423249.1 | 83 | 13 | 97 | 25 | 92 | 21 |
| AD-1423250.1 | 88 | 19 | 85 | 24 | 92 | 11 |
| AD-1423251.1 | 78 | 9 | 93 | 24 | 92 | 19 |
| AD-1423252.1 | 81 | 14 | 94 | 22 | 94 | 20 |
| AD-1423253.1 | 75 | 13 | 88 | 15 | 105 | 16 |
| AD-1423254.1 | 90 | 10 | 104 | 27 | 97 | 20 |
| AD-1423255.1 | 75 | 7 | 96 | 30 | 89 | 16 |
| AD-1423256.1 | 130 | 34 | 126 | 33 | 149 | 34 |
| AD-1423257.1 | 105 | 21 | 104 | 28 | 90 | 12 |
| AD-1423258.1 | 89 | 19 | 105 | 33 | 89 | 20 |
| AD-1423259.1 | 69 | 14 | 78 | 13 | 84 | 18 |
| AD-1423260.1 | 78 | 10 | 93 | 27 | 86 | 17 |
| AD-1423261.1 | 110 | 23 | 112 | 22 | 116 | 28 |
| AD-1423262.1 | 115 | 39 | 117 | 37 | 94 | 22 |
| AD-1423263.1 | 84 | 20 | 93 | 23 | 97 | 18 |
| AD-1423264.1 | 97 | 25 | 95 | 20 | 98 | 23 |
| AD-1423265.1 | 85 | 25 | 100 | 31 | 94 | 18 |
| AD-1423266.1 | 95 | 15 | 107 | 29 | 95 | 21 |
| AD-1423267.1 | 101 | 17 | 106 | 23 | 104 | 22 |
| AD-1423268.1 | 102 | 29 | 115 | 30 | 110 | 23 |
| AD-1423269.1 | 87 | 15 | 110 | 25 | 97 | 27 |
| AD-1423270.1 | 117 | 36 | 133 | 31 | 118 | 36 |
| AD-1423271.1 | 127 | 30 | 143 | 41 | 103 | 26 |
| AD-1423272.1 | 98 | 26 | 89 | 23 | 109 | 28 |
| AD-1423273.1 | 74 | 15 | 89 | 20 | 91 | 15 |
| AD-1423274.1 | 89 | 12 | 92 | 20 | 98 | 17 |
| AD-1423275.1 | 79 | 10 | 88 | 17 | 97 | 21 |
| AD-1423276.1 | 92 | 20 | 102 | 13 | 120 | 27 |
| AD-1423277.1 | 85 | 11 | 120 | 24 | 129 | 35 |
| AD-1423278.1 | 38 | 7 | 79 | 10 | 114 | 21 |
| AD-1423279.1 | 41 | 8 | 78 | 11 | 115 | 15 |
| AD-1423280.1 | 89 | 21 | 96 | 28 | 99 | 23 |
| AD-1423281.1 | 79 | 15 | 96 | 19 | 94 | 15 |
| AD-1423282.1 | 79 | 13 | 86 | 12 | 103 | 18 |
| AD-1423283.1 | 47 | 6 | 76 | 15 | 97 | 17 |
| AD-1423284.1 | 62 | 8 | 91 | 17 | 113 | 18 |
| AD-1423285.1 | 98 | 20 | 110 | 23 | 125 | 25 |
| AD-1423286.1 | 121 | 28 | 133 | 27 | 152 | 16 |
| AD-1423287.1 | 105 | 21 | 97 | 24 | 125 | 28 |
| AD-1423288.1 | 86 | 17 | 89 | 14 | 92 | 11 |
| AD-1423289.1 | 47 | 6 | 69 | 13 | 95 | 18 |
| AD-1423290.1 | 91 | 18 | 89 | 25 | 99 | 23 |
| AD-1423291.1 | 86 | 16 | 88 | 15 | 101 | 27 |
| AD-1423292.1 | 110 | 22 | 109 | 18 | 130 | 29 |
| AD-1423293.1 | 123 | 23 | 105 | 24 | 139 | 30 |
| AD-1423294.1 | 159 | 19 | 132 | 22 | 130 | 33 |
| AD-1423295.1 | 97 | 27 | 89 | 21 | 91 | 20 |
| AD-1423296.1 | 75 | 13 | 89 | 22 | 83 | 7 |
| AD-1423297.1 | 72 | 10 | 86 | 15 | 89 | 14 |
| AD-1423298.1 | 69 | 10 | 91 | 20 | 84 | 6 |
| AD-1423299.1 | 96 | 28 | 84 | 21 | 108 | 27 |
| AD-1423300.1 | 93 | 24 | 93 | 19 | 105 | 24 |
| AD-1397266.1 | 70 | | 82 | 22 | 91 | 32 |
| AD-1397266.2 | 94 | 10 | 104 | 16 | 113 | 21 |
| AD-1397267.1 | 89 | 27 | 107 | 41 | 113 | 33 |
| AD-1423301.1 | 131 | 18 | 112 | 27 | 135 | 33 |
| AD-1397268.1 | 133 | 45 | 98 | 34 | 116 | 39 |
| AD-1397268.2 | 87 | 17 | 95 | 20 | 108 | 20 |
| AD-1397269.1 | 104 | 49 | 115 | 42 | 128 | 34 |
| AD-1423302.1 | 85 | 13 | 98 | 19 | 102 | 13 |
| AD-1397270.1 | 86 | 12 | 103 | 35 | 112 | 25 |
| AD-1397270.2 | 99 | 19 | 94 | 19 | 92 | 19 |
| AD-1397271.1 | 110 | 30 | 89 | 31 | 124 | 42 |
| AD-1397271.2 | 84 | 16 | 106 | 25 | 108 | 18 |
| AD-1397272.1 | 91 | 7 | 86 | 24 | 95 | 28 |
| AD-1423303.1 | 93 | 18 | 111 | 24 | 102 | 16 |
| AD-1397273.1 | 102 | 15 | 101 | 24 | 87 | 12 |
| AD-1423304.1 | 108 | 24 | 124 | 32 | 123 | 23 |
| AD-1397274.1 | 86 | 7 | 90 | 14 | 119 | 19 |
| AD-1423305.1 | 114 | 19 | 135 | 14 | 136 | 16 |
| AD-1397275.1 | 109 | 36 | 107 | 29 | 124 | 8 |
| AD-1423306.1 | 72 | 10 | 95 | 26 | 82 | 13 |
| AD-1397276.1 | 128 | 42 | 135 | 27 | 142 | 22 |
| AD-1397277.1 | 137 | 29 | 117 | 30 | 131 | 17 |
| AD-1397277.2 | 76 | 16 | 81 | 13 | 80 | 8 |

### Example 2. In Vivo Evaluation in Transgenic Mice

[0765] This Example describes methods for the in vivo evaluation of MAPT RNAi agents in transgenic mice expressing human MAPT RNAs.

[0766] The ability of selected candidate dsRNA agents designed and assayed in Example 1 are assessed for their ability to reduce the level of both sense- or antisense-containing foci in mice expressing human MAPT RNAs.

[0767] Briefly, duplexes of interest, identified from the above in vitro studies and shown in Tables 3-5, are evaluated in vivo. In particular, at pre-dose day 14 wild-type, 6-8 week old female mice (C57BL/6) are transduced by retroorbital administration of 2×10¹⁰ genome copies of AAV that expresses a portion of the human MAPT gene. In particular, mice are administered an AAV encoding a portion of human MAPT gene coding exon 10 of sequence of NM_005910, cloned in it.

[0768] Two weeks later and at day 0, the mice are administered subcutaneously a single dose of one of the dsRNA agents of interest at 3 mg/Kg or PBS control. Two weeks' post-duplex dosing and at day 14, animals are sacrificed, liver samples are collected and snap-frozen in liquid nitrogen. Tissue mRNA is extracted and analyzed by the RT-QPCR method for human 4R-tau expression.

[0769] Human MAPT mRNA levels are compared to housekeeping gene GAPDH and normalized to the average of levels in the corresponding PBS vehicle control group. The values are then normalized to the average of PBS vehicle control group. The data may be expressed as percent of baseline value, and presented as mean plus standard deviation.

### Example 3. In Vitro Screening for 4R-Preferential mRNA Suppression

[0770] The human MAPT gene encodes 6 different isoforms of tau: 2N4R, 1N4R, 0N4R, 2N3R, 1N3R, 0N3R. The difference between transcripts containing the 4R (4 repeat) versus 3R (3 repeat) tau is based on the inclusion (4R) or exclusion (3R) of exon 10. Humans normally express equal ratios of 3R and 4R tau. In some tauopathies, such as Alzheimer's disease, experimental evidence from post-mortem brain tissue suggest that the insoluble aggregates of tau are comprised of 3R and 4R tau. In rarer tauopathy diseases, such as progressive supranuclear palsy (PSP) and cortical basal degeneration (CBD), the 4R tau proteins are the aggregate-prone species of tau. Therapies which target total tau (e.g., 3R+4R tau) versus only 4R tau could have beneficial effects in different disease states. Identification of siRNAs specifically targeting 4R tau and not 3R tau was sought. Because mRNA assays to measure 3R tau was lacking, a dual reporter cell line was created in which full-length 2N4R tau was fused to YFP, and 2N3R Tau was fused to mCherry. Thus, the mCherry mRNA was used as a surrogate for siRNA activity against 3R tau.

[0771] To test candidate 4R-preferential siRNAs, a dual reporter HEK293 2N4R-YFP fusion protein+2N3R-mCherry fusion protein cell line was used. In the dual reporter cell line, YFP expression is a proxy for 4R-tau levels, and mCherry expression is a proxy for 3R-tau levels. Sixty-five different siRNAs targeting exon 10 (R2 domain of tau) were synthesized by walking the entirety of the exon. The 65 potential 4R-preferential siRNAs from Table 4 were screened for 4R-preferential inhibition: AD-1423242, AD-1423243, AD-1423244, AD-1423245, AD-1423246, AD-1423247, AD-1423248, AD-1423249, AD-1423250, AD-1423251, AD-1423252, AD-1423253, AD-1423254, AD-1423255, AD-1423256, AD-1423257, AD-1423258, AD-1423259, AD-1423260, AD-1423261, AD-1423262, AD-1423263, AD-1423264, AD-1423265, AD-1423266, AD-1423267, AD-1423268, AD-1423269, AD-1423270, AD-1423271, AD-1423272, AD-1423273, AD-1423274, AD-1423275, AD-1423276, AD-1423277, AD-1423278, AD-1423279, AD-1423280, AD-1423281, AD-1423282, AD-1423283, AD-1423284, AD-1423285, AD-1423286, AD-1423287, AD-1423288, AD-1423289, AD-1423290, AD-1423291, AD-1423292, AD-1423293, AD-1423294, AD-1423295, AD-1423296, AD-1423297, AD-1423298, AD-1423299, AD-1423300, AD-1423301, AD-1423302, AD-1423303, AD-1423304, AD-1423305, and AD-1423306. Two total tau siRNAs were used as a positive control, a YFP siRNA was used as a YFP knockdown control, and an mCherry siRNA was used as an mCherry knockdown control. Doses of 0.1 nM and 1 nM were tested in triplicate at 24 hours after treatment. TaqMan assays for total tau, 4R-tau, mCherry (3R tau surrogate), and YFP (4R tau surrogate) were performed. Relative 4R tau and mCherry expression for the 65 candidate 4R siRNA duplexes are shown in FIG. 3. HEK293-2N4R-YFP+2N3R-mCherry cells were treated with 1 nM of GalNAc-conjugated siRNA in lipofectamine and harvested 48 hours later for TaqMan assays (mCherry and YFP). For each sample, the left bar shows the results of the 4R assay, and the right bar shows the results for the mCherry assay (surrogate for 3R tau).

[0772] siRNAs were selected as 4R-preferential if they resulted in robust knockdown of 4R-tau (at least 70% reduction of mRNA) and little knockdown effect on mCherry (no more than 30% reduction of mCherry mRNA). As shown in FIG. 1, thirteen of the sixty-five candidate 4R-tau siRNAs met these criteria when dosed at 1 nM (i.e., no more than 30% of 4R-tau message remaining and no greater than 30% knockdown of mCherry at 1 nM): AD-142376; AD-142383; AD-142385; AD-142387; AD-142388; AD-142389; AD-142391; AD-142394; AD-142395; AD-142396; AD-142397; AD-142399; and AD-1423300. Relative 4R-tau and mCherry expression for the thirteen selected siRNAs are shown in FIG. 2. The solid fill bars were samples treated with 1 nM siRNA, and the hatched bars were samples treated with 0.1 nM siRNAs. The data in FIG. 2 confirm that these thirteen siRNAs are 4R-preferential. In FIG. 2, AD-1397080.2 has the unmodified sense sequence UGCAAAUAGUCUACAAACCAA (SEQ ID NO: 638), and unmodified antisense sequence UUGGTUTGUAGACUAUUUGCACA (SEQ ID NO: 639). The modified sense sequence is usgscaa(Ahd)uaGfUfCfuacaaaccaaL96 (SEQ ID NO: 640) and modified antisense sequence is VPusUfsggdTu(Tgn)guagacUfaUfuugcascsa (SEQ ID NO: 641).

[0773] Analysis of the MAPT sequences targeted by the thirteen selected siRNAs revealed a particularly efficacious region of exon 10 for 4R-preferential knockdown targeting, suggesting a likely “hotspot.” See FIG. 4. It is therefore expressly contemplated that any RNAi agents possessing target sequences that reside fully within the following window of exon 10 positions are likely to exhibit a robust 4R-tau inhibitory effect: MAPT NM_005910.6 positions 1007-1053. It is also expressly contemplated that any RNAi agents possessing target sequences that reside fully within the following window of exon 10 positions may likely exhibit at least some degree of preference for knockdown of 4R-tau relative to 3R-tau (e.g., a significantly greater inhibition of 4R-tau than of 3R-tau).

[0774] Detailed lists of the unmodified MAPT sense and antisense strand nucleotide sequences for the candidate dsRNA agents targeting sequences of exon 10 that reside fully within the identified hotspot are reproduced in Table 7. Detailed lists of the modified MAPT sense and antisense strand nucleotide sequences for the candidate dsRNA agents targeting sequences of exon 10 that reside fully within the identified hotspot are reproduced in Table 8.

TABLE 7
Unmodified Sense and Antisense Strand Sequences of MAPT dsRNA Agents within the
Hotspot

| | | | Range | | | Range in |
|---|---|---|---|---|---|---|
| | Sense Sequence | SEQ ID | in | Antisense Sequence | SEQ ID | NM_005910. |
| Duplex Name | 5′ to 3′ | NO: | NM_005910.6 | 5′ to 3′ | NO: | 6 |
| AD-1423276 | GUCCAGUCCAAGU | 52 | 1009-1029 | UGAGCCACACUTGG | 129 | 1007-1029 |
| | GUGGCUCA | | | ACUGGACGU | | |
| AD-1423277 | UCCAGUCCAAGUG | 53 | 1010-1030 | UTGAGCCACACTUG | 130 | 1008-1030 |
| | UGGCUCAA | | | GACUGGACG | | |
| AD-1423278 | CCAGUCCAAGUGU | 54 | 1011-1031 | UTUGAGCCACACUU | 131 | 1009-1031 |
| | GGCUCAAA | | | GGACUGGAC | | |
| AD-1423279 | CAGUCCAAGUGUG | 55 | 1012-1032 | UTUUGAGCCACACU | 132 | 1010-1032 |
| | GCUCAAAA | | | UGGACUGGA | | |
| AD-1423280 | AGUCCAAGUGUGG | 56 | 1013-1033 | UCUUTGAGCCACAC | 133 | 1011-1033 |
| | CUCAAAGA | | | UUGGACUGG | | |
| AD-1423281 | GUCCAAGUGUGGC | 57 | 1014-1034 | UCCUTUGAGCCACA | 134 | 1012-1034 |
| | UCAAAGGA | | | CUUGGACUG | | |
| AD-1423282 | UCCAAGUGUGGCU | 58 | 1015-1035 | UTCCTUTGAGCCAC | 135 | 1013-1035 |
| | CAAAGGAA | | | ACUUGGACU | | |
| AD-1423283 | CCAAGUGUGGCUC | 59 | 1016-1036 | UAUCCUTUGAGCCA | 136 | 1014-1036 |
| | AAAGGAUA | | | CACUUGGAC | | |
| AD-1423284 | CAAGUGUGGCUCA | 60 | 1017-1037 | UTAUCCTUUGAGCC | 137 | 1015-1037 |
| | AAGGAUAA | | | ACACUUGGA | | |
| AD-1423285 | AAGUGUGGCUCAA | 61 | 1018-1038 | UTUATCCUUUGAGC | 138 | 1016-1038 |
| | AGGAUAAA | | | CACACUUGG | | |
| AD-1423286 | AGUGUGGCUCAAA | 62 | 1019-1039 | UAUUAUCCUUUGA | 139 | 1017-1039 |
| | GGAUAAUA | | | GCCACACUUG | | |
| AD-1423287 | GUGUGGCUCAAAG | 63 | 1020-1040 | UTAUTATCCUUTGA | 140 | 1018-1040 |
| | GAUAAUAA | | | GCCACACUU | | |
| AD-1423288 | UGUGGCUCAAAGG | 64 | 1021-1041 | UAUATUAUCCUTUG | 141 | 1019-1041 |
| | AUAAUAUA | | | AGCCACACU | | |
| AD-1423289 | GUGGCUCAAAGGA | 65 | 1022-1042 | UGAUAUTAUCCTUU | 142 | 1020-1042 |
| | UAAUAUCA | | | GAGCCACAC | | |
| AD-1423290 | UGGCUCAAAGGAU | 66 | 1023-1043 | UTGATATUAUCCUU | 143 | 1021-1043 |
| | AAUAUCAA | | | UGAGCCACA | | |
| AD-1423291 | GGCUCAAAGGAUA | 67 | 1024-1044 | UTUGAUAUUAUCC | 144 | 1022-1044 |
| | AUAUCAAA | | | UUUGAGCCAC | | |
| AD-1423292 | GCUCAAAGGAUAA | 68 | 1025-1045 | UTUUGATAUUATCC | 145 | 1023-1045 |
| | UAUCAAAA | | | UUUGAGCCA | | |
| AD-1423293 | CUCAAAGGAUAAU | 69 | 1026-1046 | UGUUTGAUAUUAU | 146 | 1024-1046 |
| | AUCAAACA | | | CCUUUGAGCC | | |
| AD-1423294 | UCAAAGGAUAAUA | 70 | 1027-1047 | UTGUTUGAUAUTAU | 147 | 1025-1047 |
| | UCAAACAA | | | CCUUUGAGC | | |
| AD-1423295 | CAAAGGAUAAUAU | 71 | 1028-1048 | UGUGTUTGAUATUA | 148 | 1026-1048 |
| | CAAACACA | | | UCCUUUGAG | | |
| AD-1423296 | AAAGGAUAAUAUC | 72 | 1029-1049 | UCGUGUTUGAUAU | 149 | 1027-1049 |
| | AAACACGA | | | UAUCCUUUGA | | |
| AD-1423297 | AAGGAUAAUAUCA | 73 | 1030-1050 | UACGTGTUUGATAU | 150 | 1028-1050 |
| | AACACGUA | | | UAUCCUUUG | | |
| AD-1423298 | AGGAUAAUAUCAA | 74 | 1031-1051 | UGACGUGUUUGAU | 151 | 1029-1051 |
| | ACACGUCA | | | AUUAUCCUUU | | |
| AD-1423299 | GGAUAAUAUCAAA | 75 | 1032-1052 | UGGACGTGUUUGA | 152 | 1030-1052 |
| | CACGUCCA | | | UAUUAUCCUU | | |
| AD-1423300 | GAUAAUAUCAAAC | 76 | 1033-1053 | UGGGACGUGUUTG | 153 | 1031-1053 |
| | ACGUCCCA | | | AUAUUAUCCU | | |

TABLE 8
Modified Sense and Antisense Strand Sequences of MAPT dsRNA Agents within the Hotspot

| | | SEQ | | SEQ | mRNA Target | SEQ |
|---|---|---|---|---|---|---|
| | Sense Sequence 5′ to | ID | Antisense Sequence 5′ | ID | Sequence | ID |
| Duplex ID | 3′ | NO: | to 3′ | NO: | 5′ to 3′ | NO: |
| AD-1423276 | gsuscca(Ghd)ucCfAfA | 206 | VPusdGsagdCc(Agn)cac | 283 | ACGUCCAGUCCAA | 360 |
| | fguguggcucaL96 | | udTgGfacuggacsgsu | | GUGUGGCUCA | |
| AD-1423277 | uscscag(Uhd)ccAfAfG | 207 | VPusdTsgadGc(C2p)aca | 284 | CGUCCAGUCCAAG | 361 |
| | fuguggcucaaL96 | | cdTuGfgacuggascsg | | UGUGGCUCAA | |
| AD-1423278 | cscsagu(Chd)caAfGfUf | 208 | VPusdTsugdAg(C2p)cac | 285 | GUCCAGUCCAAGU | 362 |
| | guggcucaaaL96 | | adCuUfggacuggsasc | | GUGGCUCAAA | |
| AD-1423279 | csasguc(Chd)aaGfUfGf | 209 | VPusdTsuudGa(G2p)cca | 286 | UCCAGUCCAAGUG | 363 |
| | uggcucaaaaL96 | | cdAcUfuggacugsgsa | | UGGCUCAAAG | |
| AD-1423280 | asgsucc(Ahd)agUfGfU | 210 | VPusdCsuudTg(Agn)gcc | 287 | CCAGUCCAAGUGU | 364 |
| | fggcucaaagaL96 | | adCaCfuuggacusgsg | | GGCUCAAAGG | |
| AD-1423281 | gsuscca(Ahd)guGfUfG | 211 | VPusdCscudTudGagccd | 288 | CAGUCCAAGUGUG | 365 |
| | fgcucaaaggaL96 | | AcAfcuuggacsusg | | GCUCAAAGGA | |
| AD-1423282 | uscscaa(Ghd)ugUfGfG | 212 | VPusdTsccdTudTgagcd | 289 | AGUCCAAGUGUGG | 366 |
| | fcucaaaggaaL96 | | CaCfacuuggascsu | | CUCAAAGGAU | |
| AD-1423283 | cscsaag(Uhd)guGfGfC | 213 | VPusdAsucdCudTugagd | 290 | GUCCAAGUGUGGC | 367 |
| | fucaaaggauaL96 | | CcAfcacuuggsasc | | UCAAAGGAUA | |
| AD-1423284 | csasagu(Ghd)ugGfCfU | 214 | VPusdTsaudCc(Tgn)uug | 291 | UCCAAGUGUGGCU | 368 |
| | fcaaaggauaaL96 | | adGcCfacacuugsgsa | | CAAAGGAUAA | |
| AD-1423285 | asasgug(Uhd)ggCfUfC | 215 | VPusdTsuadTc(C2p)uuu | 292 | CCAAGUGUGGCUC | 369 |
| | faaaggauaaaL96 | | gdAgCfcacacuusgsg | | AAAGGAUAAU | |
| AD-1423286 | asgsugu(Ghd)gcUfCfA | 216 | VPusdAsuudAu(C2p)cuu | 293 | CAAGUGUGGCUCA | 370 |
| | faaggauaauaL96 | | udGaGfccacacususg | | AAGGAUAAUA | |
| AD-1423287 | gsusgug(Ghd)cuCfAfA | 217 | VPusdTsaudTa(Tgn)ccu | 294 | AAGUGUGGCUCAA | 371 |
| | faggauaauaaL96 | | udTgAfgccacacsusu | | AGGAUAAUAU | |
| AD-1423288 | usgsugg(Chd)ucAfAfA | 218 | VPusdAsuadTu(Agn)ucc | 295 | AGUGUGGCUCAAA | 372 |
| | fggauaauauaL96 | | udTuGfagccacascsu | | GGAUAAUAUC | |
| AD-1423289 | gsusggc(Uhd)caAfAfG | 219 | VPusdGsaudAudTauccd | 296 | GUGUGGCUCAAAG | 373 |
| | fgauaauaucaL96 | | TuUfgagccacsasc | | GAUAAUAUCA | |
| AD-1423290 | usgsgcu(Chd)aaAfGfG | 220 | VPusdTsgadTa(Tgn)uau | 297 | UGUGGCUCAAAGG | 374 |
| | fauaauaucaaL96 | | cdCuUfugagccascsa | | AUAAUAUCAA | |
| AD-1423291 | gsgscuc(Ahd)aaGfGfA | 221 | VPusdTsugdAudAuuaud | 298 | GUGGCUCAAAGGA | 375 |
| | fuaauaucaaaL96 | | CcUfuugagccsasc | | UAAUAUCAAA | |
| AD-1423292 | gscsuca(Ahd)agGfAfU | 222 | VPusdTsuudGa(Tgn)auu | 299 | UGGCUCAAAGGAU | 376 |
| | faauaucaaaaL96 | | adTcCfuuugagcscsa | | AAUAUCAAAC | |
| AD-1423293 | csuscaa(Ahd)ggAfUfA | 223 | VPusdGsuudTg(Agn)uau | 300 | GGCUCAAAGGAUA | 377 |
| | fauaucaaacaL96 | | udAuCfcuuugagscsc | | AUAUCAAACA | |
| AD-1423294 | uscsaaa(Ghd)gaUfAfA | 224 | VPusdTsgudTu(G2p)aua | 301 | GCUCAAAGGAUAA | 378 |
| | fuaucaaacaaL96 | | udTaUfccuuugasgsc | | UAUCAAACAC | |
| AD-1423295 | csasaag(Ghd)auAfAfU | 225 | VPusdGsugdTu(Tgn)gau | 302 | CUCAAAGGAUAAU | 379 |
| | faucaaacacaL96 | | adTuAfuccuuugsasg | | AUCAAACACG | |
| AD-1423296 | asasagg(Ahd)uaAfUfA | 226 | VPusdCsgudGu(Tgn)uga | 303 | UCAAAGGAUAAUA | 380 |
| | fucaaacacgaL96 | | udAuUfauccuuusgsa | | UCAAACACGU | |
| AD-1423297 | asasgga(Uhd)aaUfAfU | 227 | VPusdAscgdTg(Tgn)uug | 304 | CAAAGGAUAAUAU | 381 |
| | fcaaacacguaL96 | | adTaUfuauccuususg | | CAAACACGUC | |
| AD-1423298 | asgsgau(Ahd)auAfUfC | 228 | VPusdGsacdGu(G2p)uuu | 305 | AAAGGAUAAUAUC | 382 |
| | faaacacgucaL96 | | gdAuAfuuauccususu | | AAACACGUCC | |
| AD-1423299 | gsgsaua(Ahd)uaUfCfA | 229 | VPusdGsgadCgdTguuud | 306 | AAGGAUAAUAUCA | 383 |
| | faacacguccaL96 | | GaUfauuauccsusu | | AACACGUCCC | |
| AD-1423300 | gsasuaa(Uhd)auCfAfA | 230 | VPusdGsggdAc(G2p)ug | 307 | AGGAUAAUAUCAA | 384 |
| | facacgucccaL96 | | uudTgAfuauuaucscsu | | ACACGUCCCG | |

### Example 4. Validation of 4R-Preferential mRNA Suppression

[0775] Following identification of the thirteen 4R preferential siRNAs, the duplexes were further studied and ranked in order to select candidates for in vivo testing. To do this, dose-response experiments were performed in the dual-reporter cells lines (HEK203 2N4R-YFP+2N3R-mCherry) and expression of 4R tau and YFP (surrogate for 4R tau) and mCherry (surrogate for 3R tau) were evaluated. From these data, IC50 curves were generated to evaluate potency and knockdown efficiency at a fixed dose (summarized in tables with IC50 values and knockdown at 100 pM in FIG. 5).

[0776] The data show that the 4R preferential siRNAs were highly specific for 4R tau, with little to no-effect on 3R tau. However, based on sequence homology of the R2 domain to the other R domains, confirmation was sought whether the 4R preferential siRNAs retained the specificity if only given the 2N3R-mCherry target. Thus, an identical set of experiments were performed in HEK293 2N3R-mCherry only cells using the same dose ranges tested in the dual reporter cell line. No effect of the 4R siRNA molecules were seen when tested in this cell system (i.e., no knockdown of 2N3R-mCherry). As a final control, the same experiment was performed in HEK293 2N4R-YFP only cells, where the potency of the 4R-preferential siRNAs was still observed. See FIGS. 6A-6B. Dose-response data for all thirteen 4R preferential siRNAs are shown in FIGS. 10-12.

[0777] The compounds were rank-ordered according to their IC50 values and knockdown efficiency at 100 pM. Some molecules were found to have “mixed” selectivity (i.e., knockdown 4R tau more potently, with a milder effect on 3R tau; “4R>3R″). For final lead selection, the three most potent 4R preferential siRNAs (AD-1423291.2, AD-1423283.2, AD-1423294.2), plus one siRNA (AD-1423295.2) that had mixed selectivity (4R>3R) were selected, which provided siRNAs that have a more potent effect on 4R and/or reduce 3R to a lesser extent).

[0778] A 4R preferential knockdown was validated with the duplexes using protein dot blotting with commercially available total tau antibody (mouse monoclonal; clone Tau12), 4R tau antibody (mouse monoclonal, clone 7D12.1), and 3R tau antibody (mouse monoclonal, clone 8E6C11). HEK293 dual reporter cells were treated with vehicle control or siRNA (1 nM for 48 hours) in Lipofectamine RNAiMax transfection reagent (diluted according to the manufacturer's instructions) (AD-1091966=total tau reducing siRNA; AD-1423291.2, AD-1423283.2, and AD-1423294.2=4R preferential siRNAs; AD-1423295.2=mixed selectivity siRNA). Lysates were collected in RIPA buffer supplemented with protease/phosphatase inhibitors, a total of 7 g (for total tau dot blot), or 21 g (for 4R tau dot blot), or 7 g (for 3R tau dot blot) was spotted into the dot blot apparatus, and blots were subjected to blotting with the total tau, 4R tau and 3R tau antibodies. The results validated the 4R preferential knockdown observed in the HEK293 dual reporter cells. See FIG. 7 (AD-1091966 has the unmodified sense sequence CGCAUGGUCAGUAAAAGCAAA (SEQ ID NO: 642), and unmodified antisense sequence UUUGCUUUUACUGACCAUGCGAG (SEQ ID NO: 643). The modified sense sequence is csgscau(Ghd)GfuCfAfGfuaaaagcasasa (SEQ ID NO: 644) and modified antisense sequence is VPusUfsugcUfuUfUfacugAfcCfaugcgsasg (SEQ ID NO: 645). A 4R preferential knockdown was also validated with the duplexes using protein ELISA-type assays. In panel A of FIG. 8, a commercially available total tau ALPHALISA (Perkin Elmer, cat no: AL271C) was used to measure total soluble tau according to the manufacturer's instructions. In panel B of FIG. 8, 4R tau protein was measured using the PathScan ELISA kit from Cell Signaling Technologies (cat no: 29443). As predicted, 4R tau levels were lower than that of total tau, since the total tau assay is measuring levels both 4R tau (should be reduced) and 3R tau (should be minimally or not affected). A 3R tau ELISA assay is performed to quantitatively measure 3R tau levels.

### Example 5. In Vivo Validation in MAPT Humanized Mice

[0779] The top 4 siRNAs were then tested in vivo in MAPT humanized mice. To do this, siRNAs with identical targeting sequences had to be synthesized with C16 conjugates to allow for CNS cell delivery. Intracerebral injection of 300 g of each siRNA was performed and the siRNA was allowed to incubate in vivo for 30 days. In this tau humanized mouse model, the reporter tags YFP and mCherry were not able to be used to assess levels of 4R and 3R tau mRNA and protein. Thus, total tau TaqMan assays (to assess global levels of 3R+4R tau), and 4R tau assays were used. See FIG. 9.

[0780] Dot blotting was performed with the total tau, 3R tau, and 4R tau antibodies on the brain lysates of the MAPT humanized mice that were treated with the 4R tau siRNAs. Lysates were collected, and a total of 1 μg/well (for total tau dot blot), 1 μg/well (for 4R tau dot blot), or 5 μg/well (for 3R tau dot blot) was spotted into the dot blot apparatus, and blots were subjected to blotting with the total tau, 4R tau and 3R tau antibodies. The results confirmed the 4R preferential knockdown for the top 4 siRNAs (data not shown). RNAscope assays to detect mRNA for 3R tau, 4R tau, and total tau are performed on neuronal cultures (in vitro) and on slices from the brains of mice treated with the 4R tau preferential siRNAs.

### EQUIVALENTS

[0781] Those skilled in the art will recognize, or be able to ascertain using no more than routine experimentation, many equivalents to the specific embodiments and methods described herein. Such equivalents are intended to be encompassed by the scope of the following claims.

MAPT SEQUENCES

SEQ ID NO: 1
>NM_016841.4 Homo sapiens microtubule associated protein tau (MAPT),
transcript variant 4, mRNA
GGACGGCCGAGCGGCAGGGCGCTCGCGCGCGCCCACTAGTGGCCGGAGGAGAAGGCTCCCGCGGAGGCCGCGCTGC
CCGCCCCCTCCCCTGGGGAGGCTCGCGTTCCCGCTGCTCGCGCCTGCGCCGCCCGCCGGCCTCAGGAACGCGCCCT
CTTCGCCGGCGCGCGCCCTCGCAGTCACCGCCACCCACCAGCTCCGGCACCAACAGCAGCGCCGCTGCCACCGCCC
ACCTTCTGCCGCCGCCACCACAGCCACCTTCTCCTCCTCCGCTGTCCTCTCCCGTCCTCGCCTCTGTCGACTATCA
GGTGAACTTTGAACCAGGATGGCTGAGCCCCGCCAGGAGTTCGAAGTGATGGAAGATCACGCTGGGACGTACGGGT
TGGGGGACAGGAAAGATCAGGGGGGCTACACCATGCACCAAGACCAAGAGGGTGACACGGACGCTGGCCTGAAAGC
TGAAGAAGCAGGCATTGGAGACACCCCCAGCCTGGAAGACGAAGCTGCTGGTCACGTGACCCAAGCTCGCATGGTC
AGTAAAAGCAAAGACGGGACTGGAAGCGATGACAAAAAAGCCAAGGGGGCTGATGGTAAAACGAAGATCGCCACAC
CGCGGGGAGCAGCCCCTCCAGGCCAGAAGGGCCAGGCCAACGCCACCAGGATTCCAGCAAAAACCCCGCCCGCTCC
AAAGACACCACCCAGCTCTGGTGAACCTCCAAAATCAGGGGATCGCAGCGGCTACAGCAGCCCCGGCTCCCCAGGC
ACTCCCGGCAGCCGCTCCCGCACCCCGTCCCTTCCAACCCCACCCACCCGGGAGCCCAAGAAGGTGGCAGTGGTCC
GTACTCCACCCAAGTCGCCGTCTTCCGCCAAGAGCCGCCTGCAGACAGCCCCCGTGCCCATGCCAGACCTGAAGAA
TGTCAAGTCCAAGATCGGCTCCACTGAGAACCTGAAGCACCAGCCGGGAGGCGGGAAGGTGCAAATAGTCTACAAA
CCAGTTGACCTGAGCAAGGTGACCTCCAAGTGTGGCTCATTAGGCAACATCCATCATAAACCAGGAGGTGGCCAGG
TGGAAGTAAAATCTGAGAAGCTTGACTTCAAGGACAGAGTCCAGTCGAAGATTGGGTCCCTGGACAATATCACCCA
CGTCCCTGGCGGAGGAAATAAAAAGATTGAAACCCACAAGCTGACCTTCCGCGAGAACGCCAAAGCCAAGACAGAC
CACGGGGCGGAGATCGTGTACAAGTCGCCAGTGGTGTCTGGGGACACGTCTCCACGGCATCTCAGCAATGTCTCCT
CCACCGGCAGCATCGACATGGTAGACTCGCCCCAGCTCGCCACGCTAGCTGACGAGGTGTCTGCCTCCCTGGCCAA
GCAGGGTTTGTGATCAGGCCCCTGGGGCGGTCAATAATTGTGGAGAGGAGAGAATGAGAGAGTGTGGAAAAAAAAA
GAATAATGACCCGGCCCCCGCCCTCTGCCCCCAGCTGCTCCTCGCAGTTCGGTTAATTGGTTAATCACTTAACCTG
CTTTTGTCACTCGGCTTTGGCTCGGGACTTCAAAATCAGTGATGGGAGTAAGAGCAAATTTCATCTTTCCAAATTG
ATGGGTGGGCTAGTAATAAAATATTTAAAAAAAAACATTCAAAAACATGGCCACATCCAACATTTCCTCAGGCAAT
TCCTTTTGATTCTTTTTTCTTCCCCCTCCATGTAGAAGAGGGAGAAGGAGAGGCTCTGAAAGCTGCTTCTGGGGGA
TTTCAAGGGACTGGGGGTGCCAACCACCTCTGGCCCTGTTGTGGGGGTGTCACAGAGGCAGTGGCAGCAACAAAGG
ATTTGAAACTTGGTGTGTTCGTGGAGCCACAGGCAGACGATGTCAACCTTGTGTGAGTGTGACGGGGGTTGGGGTG
GGGCGGGAGGCCACGGGGGAGGCCGAGGCAGGGGCTGGGCAGAGGGGAGAGGAAGCACAAGAAGTGGGAGTGGGAG
AGGAAGCCACGTGCTGGAGAGTAGACATCCCCCTCCTTGCCGCTGGGAGAGCCAAGGCCTATGCCACCTGCAGCGT
CTGAGCGGCCGCCTGTCCTTGGTGGCCGGGGGTGGGGGCCTGCTGTGGGTCAGTGTGCCACCCTCTGCAGGGCAGC
CTGTGGGAGAAGGGACAGCGGGTAAAAAGAGAAGGCAAGCTGGCAGGAGGGTGGCACTTCGTGGATGACCTCCTTA
GAAAAGACTGACCTTGATGTCTTGAGAGCGCTGGCCTCTTCCTCCCTCCCTGCAGGGTAGGGGGCCTGAGTTGAGG
GGCTTCCCTCTGCTCCACAGAAACCCTGTTTTATTGAGTTCTGAAGGTTGGAACTGCTGCCATGATTTTGGCCACT
TTGCAGACCTGGGACTTTAGGGCTAACCAGTTCTCTTTGTAAGGACTTGTGCCTCTTGGGAGACGTCCACCCGTTT
CCAAGCCTGGGCCACTGGCATCTCTGGAGTGTGTGGGGGTCTGGGAGGCAGGTCCCGAGCCCCCTGTCCTTCCCAC
GGCCACTGCAGTCACCCCGTCTGCGCCGCTGTGCTGTTGTCTGCCGTGAGAGCCCAATCACTGCCTATACCCCTCA
TCACACGTCACAATGTCCCGAATTCCCAGCCTCACCACCCCTTCTCAGTAATGACCCTGGTTGGTTGCAGGAGGTA
CCTACTCCATACTGAGGGTGAAATTAAGGGAAGGCAAAGTCCAGGCACAAGAGTGGGACCCCAGCCTCTCACTCTC
AGTTCCACTCATCCAACTGGGACCCTCACCACGAATCTCATGATCTGATTCGGTTCCCTGTCTCCTCCTCCCGTCA
CAGATGTGAGCCAGGGCACTGCTCAGCTGTGACCCTAGGTGTTTCTGCCTTGTTGACATGGAGAGAGCCCTTTCCC
CTGAGAAGGCCTGGCCCCTTCCTGTGCTGAGCCCACAGCAGCAGGCTGGGTGTCTTGGTTGTCAGTGGTGGCACCA
GGATGGAAGGGCAAGGCACCCAGGGCAGGCCCACAGTCCCGCTGTCCCCCACTTGCACCCTAGCTTGTAGCTGCCA
ACCTCCCAGACAGCCCAGCCCGCTGCTCAGCTCCACATGCATAGTATCAGCCCTCCACACCCGACAAAGGGGAACA
CACCCCCTTGGAAATGGTTCTTTTCCCCCAGTCCCAGCTGGAAGCCATGCTGTCTGTTCTGCTGGAGCAGCTGAAC
ATATACATAGATGTTGCCCTGCCCTCCCCATCTGCACCCTGTTGAGTTGTAGTTGGATTTGTCTGTTTATGCTTGG
ATTCACCAGAGTGACTATGATAGTGAAAAGAAAAAAAAAAAAAAAAAAGGACGCATGTATCTTGAAATGCTTGTAA
AGAGGTTTCTAACCCACCCTCACGAGGTGTCTCTCACCCCCACACTGGGACTCGTGTGGCCTGTGTGGTGCCACCC
TGCTGGGGCCTCCCAAGTTTTGAAAGGCTTTCCTCAGCACCTGGGACCCAACAGAGACCAGCTTCTAGCAGCTAAG
GAGGCCGTTCAGCTGTGACGAAGGCCTGAAGCACAGGATTAGGACTGAAGCGATGATGTCCCCTTCCCTACTTCCC
CTTGGGGCTCCCTGTGTCAGGGCACAGACTAGGTCTTGTGGCTGGTCTGGCTTGCGGCGCGAGGATGGTTCTCTCT
GGTCATAGCCCGAAGTCTCATGGCAGTCCCAAAGGAGGCTTACAACTCCTGCATCACAAGAAAAAGGAAGCCACTG
CCAGCTGGGGGGATCTGCAGCTCCCAGAAGCTCCGTGAGCCTCAGCCACCCCTCAGACTGGGTTCCTCTCCAAGCT
CGCCCTCTGGAGGGGCAGCGCAGCCTCCCACCAAGGGCCCTGCGACCACAGCAGGGATTGGGATGAATTGCCTGTC
CTGGATCTGCTCTAGAGGCCCAAGCTGCCTGCCTGAGGAAGGATGACTTGACAAGTCAGGAGACACTGTTCCCAAA
GCCTTGACCAGAGCACCTCAGCCCGCTGACCTTGCACAAACTCCATCTGCTGCCATGAGAAAAGGGAAGCCGCCTT
TGCAAAACATTGCTGCCTAAAGAAACTCAGCAGCCTCAGGCCCAATTCTGCCACTTCTGGTTTGGGTACAGTTAAA
GGCAACCCTGAGGGACTTGGCAGTAGAAATCCAGGGCCTCCCCTGGGGCTGGCAGCTTCGTGTGCAGCTAGAGCTT
TACCTGAAAGGAAGTCTCTGGGCCCAGAACTCTCCACCAAGAGCCTCCCTGCCGTTCGCTGAGTCCCAGCAATTCT
CCTAAGTTGAAGGGATCTGAGAAGGAGAAGGAAATGTGGGGTAGATTTGGTGGTGGTTAGAGATATGCCCCCCTCA
TTACTGCCAACAGTTTCGGCTGCATTTCTTCACGCACCTCGGTTCCTCTTCCTGAAGTTCTTGTGCCCTGCTCTTC
AGCACCATGGGCCTTCTTATACGGAAGGCTCTGGGATCTCCCCCTTGTGGGGCAGGCTCTTGGGGCCAGCCTAAGA
TCATGGTTTAGGGTGATCAGTGCTGGCAGATAAATTGAAAAGGCACGCTGGCTTGTGATCTTAAATGAGGACAATC
CCCCCAGGGCTGGGCACTCCTCCCCTCCCCTCACTTCTCCCACCTGCAGAGCCAGTGTCCTTGGGTGGGCTAGATA
GGATATACTGTATGCCGGCTCCTTCAAGCTGCTGACTCACTTTATCAATAGTTCCATTTAAATTGACTTCAGTGGT
GAGACTGTATCCTGTTTGCTATTGCTTGTTGTGCTATGGGGGGAGGGGGGAGGAATGTGTAAGATAGTTAACATGG
GCAAAGGGAGATCTTGGGGTGCAGCACTTAAACTGCCTCGTAACCCTTTTCATGATTTCAACCACATTTGCTAGAG
GGAGGGAGCAGCCACGGAGTTAGAGGCCCTTGGGGTTTCTCTTTTCCACTGACAGGCTTTCCCAGGCAGCTGGCTA
GTTCATTCCCTCCCCAGCCAGGTGCAGGCGTAGGAATATGGACATCTGGTTGCTTTGGCCTGCTGCCCTCTTTCAG
GGGTCCTAAGCCCACAATCATGCCTCCCTAAGACCTTGGCATCCTTCCCTCTAAGCCGTTGGCACCTCTGTGCCAC
CTCTCACACTGGCTCCAGACACACAGCCTGTGCTTTTGGAGCTGAGATCACTCGCTTCACCCTCCTCATCTTTGTT
CTCCAAGTAAAGCCACGAGGTCGGGGCGAGGGCAGAGGTGATCACCTGCGTGTCCCATCTACAGACCTGCAGCTTC
ATAAAACTTCTGATTTCTCTTCAGCTTTGAAAAGGGTTACCCTGGGCACTGGCCTAGAGCCTCACCTCCTAATAGA
CTTAGCCCCATGAGTTTGCCATGTTGAGCAGGACTATTTCTGGCACTTGCAAGTCCCATGATTTCTTCGGTAATTC
TGAGGGTGGGGGGAGGGACATGAAATCATCTTAGCTTAGCTTTCTGTCTGTGAATGTCTATATAGTGTATTGTGTG
TTTTAACAAATGATTTACACTGACTGTTGCTGTAAAAGTGAATTTGGAAATAAAGTTATTACTCTGATTAAA
SEQ ID NO: 2
>Reverse Complement of SEQ ID NO: 1
TTTAATCAGAGTAATAACTTTATTTCCAAATTCACTTTTACAGCAACAGTCAGTGTAAATCATTTGTTAAAACACA
CAATACACTATATAGACATTCACAGACAGAAAGCTAAGCTAAGATGATTTCATGTCCCTCCCCCCACCCTCAGAAT
TACCGAAGAAATCATGGGACTTGCAAGTGCCAGAAATAGTCCTGCTCAACATGGCAAACTCATGGGGCTAAGTCTA
TTAGGAGGTGAGGCTCTAGGCCAGTGCCCAGGGTAACCCTTTTCAAAGCTGAAGAGAAATCAGAAGTTTTATGAAG
CTGCAGGTCTGTAGATGGGACACGCAGGTGATCACCTCTGCCCTCGCCCCGACCTCGTGGCTTTACTTGGAGAACA
AAGATGAGGAGGGTGAAGCGAGTGATCTCAGCTCCAAAAGCACAGGCTGTGTGTCTGGAGCCAGTGTGAGAGGTGG
CACAGAGGTGCCAACGGCTTAGAGGGAAGGATGCCAAGGTCTTAGGGAGGCATGATTGTGGGCTTAGGACCCCTGA
AAGAGGGCAGCAGGCCAAAGCAACCAGATGTCCATATTCCTACGCCTGCACCTGGCTGGGGAGGGAATGAACTAGC
CAGCTGCCTGGGAAAGCCTGTCAGTGGAAAAGAGAAACCCCAAGGGCCTCTAACTCCGTGGCTGCTCCCTCCCTCT
AGCAAATGTGGTTGAAATCATGAAAAGGGTTACGAGGCAGTTTAAGTGCTGCACCCCAAGATCTCCCTTTGCCCAT
GTTAACTATCTTACACATTCCTCCCCCCTCCCCCCATAGCACAACAAGCAATAGCAAACAGGATACAGTCTCACCA
CTGAAGTCAATTTAAATGGAACTATTGATAAAGTGAGTCAGCAGCTTGAAGGAGCCGGCATACAGTATATCCTATC
TAGCCCACCCAAGGACACTGGCTCTGCAGGTGGGAGAAGTGAGGGGAGGGGAGGAGTGCCCAGCCCTGGGGGGATT
GTCCTCATTTAAGATCACAAGCCAGCGTGCCTTTTCAATTTATCTGCCAGCACTGATCACCCTAAACCATGATCTT
AGGCTGGCCCCAAGAGCCTGCCCCACAAGGGGGAGATCCCAGAGCCTTCCGTATAAGAAGGCCCATGGTGCTGAAG
AGCAGGGCACAAGAACTTCAGGAAGAGGAACCGAGGTGCGTGAAGAAATGCAGCCGAAACTGTTGGCAGTAATGAG
GGGGGCATATCTCTAACCACCACCAAATCTACCCCACATTTCCTTCTCCTTCTCAGATCCCTTCAACTTAGGAGAA
TTGCTGGGACTCAGCGAACGGCAGGGAGGCTCTTGGTGGAGAGTTCTGGGCCCAGAGACTTCCTTTCAGGTAAAGC
TCTAGCTGCACACGAAGCTGCCAGCCCCAGGGGAGGCCCTGGATTTCTACTGCCAAGTCCCTCAGGGTTGCCTTTA
ACTGTACCCAAACCAGAAGTGGCAGAATTGGGCCTGAGGCTGCTGAGTTTCTTTAGGCAGCAATGTTTTGCAAAGG
CGGCTTCCCTTTTCTCATGGCAGCAGATGGAGTTTGTGCAAGGTCAGCGGGCTGAGGTGCTCTGGTCAAGGCTTTG
GGAACAGTGTCTCCTGACTTGTCAAGTCATCCTTCCTCAGGCAGGCAGCTTGGGCCTCTAGAGCAGATCCAGGACA
GGCAATTCATCCCAATCCCTGCTGTGGTCGCAGGGCCCTTGGTGGGAGGCTGCGCTGCCCCTCCAGAGGGCGAGCT
TGGAGAGGAACCCAGTCTGAGGGGTGGCTGAGGCTCACGGAGCTTCTGGGAGCTGCAGATCCCCCCAGCTGGCAGT
GGCTTCCTTTTTCTTGTGATGCAGGAGTTGTAAGCCTCCTTTGGGACTGCCATGAGACTTCGGGCTATGACCAGAG
AGAACCATCCTCGCGCCGCAAGCCAGACCAGCCACAAGACCTAGTCTGTGCCCTGACACAGGGAGCCCCAAGGGGA
AGTAGGGAAGGGGACATCATCGCTTCAGTCCTAATCCTGTGCTTCAGGCCTTCGTCACAGCTGAACGGCCTCCTTA
GCTGCTAGAAGCTGGTCTCTGTTGGGTCCCAGGTGCTGAGGAAAGCCTTTCAAAACTTGGGAGGCCCCAGCAGGGT
GGCACCACACAGGCCACACGAGTCCCAGTGTGGGGGTGAGAGACACCTCGTGAGGGTGGGTTAGAAACCTCTTTAC
AAGCATTTCAAGATACATGCGTCCTTTTTTTTTTTTTTTTTTCTTTTCACTATCATAGTCACTCTGGTGAATCCAA
GCATAAACAGACAAATCCAACTACAACTCAACAGGGTGCAGATGGGGAGGGCAGGGCAACATCTATGTATATGTTC
AGCTGCTCCAGCAGAACAGACAGCATGGCTTCCAGCTGGGACTGGGGGAAAAGAACCATTTCCAAGGGGGTGTGTT
CCCCTTTGTCGGGTGTGGAGGGCTGATACTATGCATGTGGAGCTGAGCAGCGGGCTGGGCTGTCTGGGAGGTTGGC
AGCTACAAGCTAGGGTGCAAGTGGGGGACAGCGGGACTGTGGGCCTGCCCTGGGTGCCTTGCCCTTCCATCCTGGT
GCCACCACTGACAACCAAGACACCCAGCCTGCTGCTGTGGGCTCAGCACAGGAAGGGGCCAGGCCTTCTCAGGGGA
AAGGGCTCTCTCCATGTCAACAAGGCAGAAACACCTAGGGTCACAGCTGAGCAGTGCCCTGGCTCACATCTGTGAC
GGGAGGAGGAGACAGGGAACCGAATCAGATCATGAGATTCGTGGTGAGGGTCCCAGTTGGATGAGTGGAACTGAGA
GTGAGAGGCTGGGGTCCCACTCTTGTGCCTGGACTTTGCCTTCCCTTAATTTCACCCTCAGTATGGAGTAGGTACC
TCCTGCAACCAACCAGGGTCATTACTGAGAAGGGGTGGTGAGGCTGGGAATTCGGGACATTGTGACGTGTGATGAG
GGGTATAGGCAGTGATTGGGCTCTCACGGCAGACAACAGCACAGCGGCGCAGACGGGGTGACTGCAGTGGCCGTGG
GAAGGACAGGGGGCTCGGGACCTGCCTCCCAGACCCCCACACACTCCAGAGATGCCAGTGGCCCAGGCTTGGAAAC
GGGTGGACGTCTCCCAAGAGGCACAAGTCCTTACAAAGAGAACTGGTTAGCCCTAAAGTCCCAGGTCTGCAAAGTG
GCCAAAATCATGGCAGCAGTTCCAACCTTCAGAACTCAATAAAACAGGGTTTCTGTGGAGCAGAGGGAAGCCCCTC
AACTCAGGCCCCCTACCCTGCAGGGAGGGAGGAAGAGGCCAGCGCTCTCAAGACATCAAGGTCAGTCTTTTCTAAG
GAGGTCATCCACGAAGTGCCACCCTCCTGCCAGCTTGCCTTCTCTTTTTACCCGCTGTCCCTTCTCCCACAGGCTG
CCCTGCAGAGGGTGGCACACTGACCCACAGCAGGCCCCCACCCCCGGCCACCAAGGACAGGCGGCCGCTCAGACGC
TGCAGGTGGCATAGGCCTTGGCTCTCCCAGCGGCAAGGAGGGGGATGTCTACTCTCCAGCACGTGGCTTCCTCTCC
CACTCCCACTTCTTGTGCTTCCTCTCCCCTCTGCCCAGCCCCTGCCTCGGCCTCCCCCGTGGCCTCCCGCCCCACC
CCAACCCCCGTCACACTCACACAAGGTTGACATCGTCTGCCTGTGGCTCCACGAACACACCAAGTTTCAAATCCTT
TGTTGCTGCCACTGCCTCTGTGACACCCCCACAACAGGGCCAGAGGTGGTTGGCACCCCCAGTCCCTTGAAATCCC
CCAGAAGCAGCTTTCAGAGCCTCTCCTTCTCCCTCTTCTACATGGAGGGGGAAGAAAAAAGAATCAAAAGGAATTG
CCTGAGGAAATGTTGGATGTGGCCATGTTTTTGAATGTTTTTTTTTAAATATTTTATTACTAGCCCACCCATCAAT
TTGGAAAGATGAAATTTGCTCTTACTCCCATCACTGATTTTGAAGTCCCGAGCCAAAGCCGAGTGACAAAAGCAGG
TTAAGTGATTAACCAATTAACCGAACTGCGAGGAGCAGCTGGGGGCAGAGGGCGGGGGCCGGGTCATTATTCTTTT
TTTTTCCACACTCTCTCATTCTCTCCTCTCCACAATTATTGACCGCCCCAGGGGCCTGATCACAAACCCTGCTTGG
CCAGGGAGGCAGACACCTCGTCAGCTAGCGTGGCGAGCTGGGGCGAGTCTACCATGTCGATGCTGCCGGTGGAGGA
GACATTGCTGAGATGCCGTGGAGACGTGTCCCCAGACACCACTGGCGACTTGTACACGATCTCCGCCCCGTGGTCT
GTCTTGGCTTTGGCGTTCTCGCGGAAGGTCAGCTTGTGGGTTTCAATCTTTTTATTTCCTCCGCCAGGGACGTGGG
TGATATTGTCCAGGGACCCAATCTTCGACTGGACTCTGTCCTTGAAGTCAAGCTTCTCAGATTTTACTTCCACCTG
GCCACCTCCTGGTTTATGATGGATGTTGCCTAATGAGCCACACTTGGAGGTCACCTTGCTCAGGTCAACTGGTTTG
TAGACTATTTGCACCTTCCCGCCTCCCGGCTGGTGCTTCAGGTTCTCAGTGGAGCCGATCTTGGACTTGACATTCT
TCAGGTCTGGCATGGGCACGGGGGCTGTCTGCAGGCGGCTCTTGGCGGAAGACGGCGACTTGGGTGGAGTACGGAC
CACTGCCACCTTCTTGGGCTCCCGGGTGGGTGGGGTTGGAAGGGACGGGGTGCGGGAGCGGCTGCCGGGAGTGCCT
GGGGAGCCGGGGCTGCTGTAGCCGCTGCGATCCCCTGATTTTGGAGGTTCACCAGAGCTGGGTGGTGTCTTTGGAG
CGGGCGGGGTTTTTGCTGGAATCCTGGTGGCGTTGGCCTGGCCCTTCTGGCCTGGAGGGGCTGCTCCCCGCGGTGT
GGCGATCTTCGTTTTACCATCAGCCCCCTTGGCTTTTTTGTCATCGCTTCCAGTCCCGTCTTTGCTTTTACTGACC
ATGCGAGCTTGGGTCACGTGACCAGCAGCTTCGTCTTCCAGGCTGGGGGTGTCTCCAATGCCTGCTTCTTCAGCTT
TCAGGCCAGCGTCCGTGTCACCCTCTTGGTCTTGGTGCATGGTGTAGCCCCCCTGATCTTTCCTGTCCCCCAACCC
GTACGTCCCAGCGTGATCTTCCATCACTTCGAACTCCTGGCGGGGCTCAGCCATCCTGGTTCAAAGTTCACCTGAT
AGTCGACAGAGGCGAGGACGGGAGAGGACAGCGGAGGAGGAGAAGGTGGCTGTGGTGGCGGCGGCAGAAGGTGGGC
GGTGGCAGCGGCGCTGCTGTTGGTGCCGGAGCTGGTGGGTGGCGGTGACTGCGAGGGCGCGCGCCGGCGAAGAGGG
CGCGTTCCTGAGGCCGGCGGGCGGCGCAGGCGCGAGCAGCGGGAACGCGAGCCTCCCCAGGGGAGGGGGCGGGCAG
CGCGGCCTCCGCGGGAGCCTTCTCCTCCGGCCACTAGTGGGCGCGCGCGAGCGCCCTGCCGCTCGGCCGTCC
SEQ ID NO: 3
>NM_005910.6 Homo sapiens microtubule associated protein tau (MAPT),
transcript variant 2, mRNA
GCAGTCACCGCCACCCACCAGCTCCGGCACCAACAGCAGCGCCGCTGCCACCGCCCACCTTCTGCCGCCGCCACCA
CAGCCACCTTCTCCTCCTCCGCTGTCCTCTCCCGTCCTCGCCTCTGTCGACTATCAGGTGAACTTTGAACCAGGAT
GGCTGAGCCCCGCCAGGAGTTCGAAGTGATGGAAGATCACGCTGGGACGTACGGGTTGGGGGACAGGAAAGATCAG
GGGGGCTACACCATGCACCAAGACCAAGAGGGTGACACGGACGCTGGCCTGAAAGAATCTCCCCTGCAGACCCCCA
CTGAGGACGGATCTGAGGAACCGGGCTCTGAAACCTCTGATGCTAAGAGCACTCCAACAGCGGAAGATGTGACAGC
ACCCTTAGTGGATGAGGGAGCTCCCGGCAAGCAGGCTGCCGCGCAGCCCCACACGGAGATCCCAGAAGGAACCACA
GCTGAAGAAGCAGGCATTGGAGACACCCCCAGCCTGGAAGACGAAGCTGCTGGTCACGTGACCCAAGCTCGCATGG
TCAGTAAAAGCAAAGACGGGACTGGAAGCGATGACAAAAAAGCCAAGGGGGCTGATGGTAAAACGAAGATCGCCAC
ACCGCGGGGAGCAGCCCCTCCAGGCCAGAAGGGCCAGGCCAACGCCACCAGGATTCCAGCAAAAACCCCGCCCGCT
CCAAAGACACCACCCAGCTCTGGTGAACCTCCAAAATCAGGGGATCGCAGCGGCTACAGCAGCCCCGGCTCCCCAG
GCACTCCCGGCAGCCGCTCCCGCACCCCGTCCCTTCCAACCCCACCCACCCGGGAGCCCAAGAAGGTGGCAGTGGT
CCGTACTCCACCCAAGTCGCCGTCTTCCGCCAAGAGCCGCCTGCAGACAGCCCCCGTGCCCATGCCAGACCTGAAG
AATGTCAAGTCCAAGATCGGCTCCACTGAGAACCTGAAGCACCAGCCGGGAGGCGGGAAGGTGCAGATAATTAATA
AGAAGCTGGATCTTAGCAACGTCCAGTCCAAGTGTGGCTCAAAGGATAATATCAAACACGTCCCGGGAGGCGGCAG
TGTGCAAATAGTCTACAAACCAGTTGACCTGAGCAAGGTGACCTCCAAGTGTGGCTCATTAGGCAACATCCATCAT
AAACCAGGAGGTGGCCAGGTGGAAGTAAAATCTGAGAAGCTTGACTTCAAGGACAGAGTCCAGTCGAAGATTGGGT
CCCTGGACAATATCACCCACGTCCCTGGCGGAGGAAATAAAAAGATTGAAACCCACAAGCTGACCTTCCGCGAGAA
CGCCAAAGCCAAGACAGACCACGGGGCGGAGATCGTGTACAAGTCGCCAGTGGTGTCTGGGGACACGTCTCCACGG
CATCTCAGCAATGTCTCCTCCACCGGCAGCATCGACATGGTAGACTCGCCCCAGCTCGCCACGCTAGCTGACGAGG
TGTCTGCCTCCCTGGCCAAGCAGGGTTTGTGATCAGGCCCCTGGGGCGGTCAATAATTGTGGAGAGGAGAGAATGA
GAGAGTGTGGAAAAAAAAAGAATAATGACCCGGCCCCCGCCCTCTGCCCCCAGCTGCTCCTCGCAGTTCGGTTAAT
TGGTTAATCACTTAACCTGCTTTTGTCACTCGGCTTTGGCTCGGGACTTCAAAATCAGTGATGGGAGTAAGAGCAA
ATTTCATCTTTCCAAATTGATGGGTGGGCTAGTAATAAAATATTTAAAAAAAAACATTCAAAAACATGGCCACATC
CAACATTTCCTCAGGCAATTCCTTTTGATTCTTTTTTCTTCCCCCTCCATGTAGAAGAGGGAGAAGGAGAGGCTCT
GAAAGCTGCTTCTGGGGGATTTCAAGGGACTGGGGGTGCCAACCACCTCTGGCCCTGTTGTGGGGGTGTCACAGAG
GCAGTGGCAGCAACAAAGGATTTGAAACTTGGTGTGTTCGTGGAGCCACAGGCAGACGATGTCAACCTTGTGTGAG
TGTGACGGGGGTTGGGGTGGGGGGGGAGGCCACGGGGGAGGCCGAGGCAGGGGCTGGGCAGAGGGGAGAGGAAGCA
CAAGAAGTGGGAGTGGGAGAGGAAGCCACGTGCTGGAGAGTAGACATCCCCCTCCTTGCCGCTGGGAGAGCCAAGG
CCTATGCCACCTGCAGCGTCTGAGCGGCCGCCTGTCCTTGGTGGCCGGGGGTGGGGGCCTGCTGTGGGTCAGTGTG
CCACCCTCTGCAGGGCAGCCTGTGGGAGAAGGGACAGCGGGTAAAAAGAGAAGGCAAGCTGGCAGGAGGGTGGCAC
TTCGTGGATGACCTCCTTAGAAAAGACTGACCTTGATGTCTTGAGAGCGCTGGCCTCTTCCTCCCTCCCTGCAGGG
TAGGGGGCCTGAGTTGAGGGGCTTCCCTCTGCTCCACAGAAACCCTGTTTTATTGAGTTCTGAAGGTTGGAACTGC
TGCCATGATTTTGGCCACTTTGCAGACCTGGGACTTTAGGGCTAACCAGTTCTCTTTGTAAGGACTTGTGCCTCTT
GGGAGACGTCCACCCGTTTCCAAGCCTGGGCCACTGGCATCTCTGGAGTGTGTGGGGGTCTGGGAGGCAGGTCCCG
AGCCCCCTGTCCTTCCCACGGCCACTGCAGTCACCCCGTCTGCGCCGCTGTGCTGTTGTCTGCCGTGAGAGCCCAA
TCACTGCCTATACCCCTCATCACACGTCACAATGTCCCGAATTCCCAGCCTCACCACCCCTTCTCAGTAATGACCC
TGGTTGGTTGCAGGAGGTACCTACTCCATACTGAGGGTGAAATTAAGGGAAGGCAAAGTCCAGGCACAAGAGTGGG
ACCCCAGCCTCTCACTCTCAGTTCCACTCATCCAACTGGGACCCTCACCACGAATCTCATGATCTGATTCGGTTCC
CTGTCTCCTCCTCCCGTCACAGATGTGAGCCAGGGCACTGCTCAGCTGTGACCCTAGGTGTTTCTGCCTTGTTGAC
ATGGAGAGAGCCCTTTCCCCTGAGAAGGCCTGGCCCCTTCCTGTGCTGAGCCCACAGCAGCAGGCTGGGTGTCTTG
GTTGTCAGTGGTGGCACCAGGATGGAAGGGCAAGGCACCCAGGGCAGGCCCACAGTCCCGCTGTCCCCCACTTGCA
CCCTAGCTTGTAGCTGCCAACCTCCCAGACAGCCCAGCCCGCTGCTCAGCTCCACATGCATAGTATCAGCCCTCCA
CACCCGACAAAGGGGAACACACCCCCTTGGAAATGGTTCTTTTCCCCCAGTCCCAGCTGGAAGCCATGCTGTCTGT
TCTGCTGGAGCAGCTGAACATATACATAGATGTTGCCCTGCCCTCCCCATCTGCACCCTGTTGAGTTGTAGTTGGA
TTTGTCTGTTTATGCTTGGATTCACCAGAGTGACTATGATAGTGAAAAGAAAAAAAAAAAAAAAAAAGGACGCATG
TATCTTGAAATGCTTGTAAAGAGGTTTCTAACCCACCCTCACGAGGTGTCTCTCACCCCCACACTGGGACTCGTGT
GGCCTGTGTGGTGCCACCCTGCTGGGGCCTCCCAAGTTTTGAAAGGCTTTCCTCAGCACCTGGGACCCAACAGAGA
CCAGCTTCTAGCAGCTAAGGAGGCCGTTCAGCTGTGACGAAGGCCTGAAGCACAGGATTAGGACTGAAGCGATGAT
GTCCCCTTCCCTACTTCCCCTTGGGGCTCCCTGTGTCAGGGCACAGACTAGGTCTTGTGGCTGGTCTGGCTTGCGG
CGCGAGGATGGTTCTCTCTGGTCATAGCCCGAAGTCTCATGGCAGTCCCAAAGGAGGCTTACAACTCCTGCATCAC
AAGAAAAAGGAAGCCACTGCCAGCTGGGGGGATCTGCAGCTCCCAGAAGCTCCGTGAGCCTCAGCCACCCCTCAGA
CTGGGTTCCTCTCCAAGCTCGCCCTCTGGAGGGGCAGCGCAGCCTCCCACCAAGGGCCCTGCGACCACAGCAGGGA
TTGGGATGAATTGCCTGTCCTGGATCTGCTCTAGAGGCCCAAGCTGCCTGCCTGAGGAAGGATGACTTGACAAGTC
AGGAGACACTGTTCCCAAAGCCTTGACCAGAGCACCTCAGCCCGCTGACCTTGCACAAACTCCATCTGCTGCCATG
AGAAAAGGGAAGCCGCCTTTGCAAAACATTGCTGCCTAAAGAAACTCAGCAGCCTCAGGCCCAATTCTGCCACTTC
TGGTTTGGGTACAGTTAAAGGCAACCCTGAGGGACTTGGCAGTAGAAATCCAGGGCCTCCCCTGGGGCTGGCAGCT
TCGTGTGCAGCTAGAGCTTTACCTGAAAGGAAGTCTCTGGGCCCAGAACTCTCCACCAAGAGCCTCCCTGCCGTTC
GCTGAGTCCCAGCAATTCTCCTAAGTTGAAGGGATCTGAGAAGGAGAAGGAAATGTGGGGTAGATTTGGTGGTGGT
TAGAGATATGCCCCCCTCATTACTGCCAACAGTTTCGGCTGCATTTCTTCACGCACCTCGGTTCCTCTTCCTGAAG
TTCTTGTGCCCTGCTCTTCAGCACCATGGGCCTTCTTATACGGAAGGCTCTGGGATCTCCCCCTTGTGGGGCAGGC
TCTTGGGGCCAGCCTAAGATCATGGTTTAGGGTGATCAGTGCTGGCAGATAAATTGAAAAGGCACGCTGGCTTGTG
ATCTTAAATGAGGACAATCCCCCCAGGGCTGGGCACTCCTCCCCTCCCCTCACTTCTCCCACCTGCAGAGCCAGTG
TCCTTGGGTGGGCTAGATAGGATATACTGTATGCCGGCTCCTTCAAGCTGCTGACTCACTTTATCAATAGTTCCAT
TTAAATTGACTTCAGTGGTGAGACTGTATCCTGTTTGCTATTGCTTGTTGTGCTATGGGGGGAGGGGGGAGGAATG
TGTAAGATAGTTAACATGGGCAAAGGGAGATCTTGGGGTGCAGCACTTAAACTGCCTCGTAACCCTTTTCATGATT
TCAACCACATTTGCTAGAGGGAGGGAGCAGCCACGGAGTTAGAGGCCCTTGGGGTTTCTCTTTTCCACTGACAGGC
TTTCCCAGGCAGCTGGCTAGTTCATTCCCTCCCCAGCCAGGTGCAGGCGTAGGAATATGGACATCTGGTTGCTTTG
GCCTGCTGCCCTCTTTCAGGGGTCCTAAGCCCACAATCATGCCTCCCTAAGACCTTGGCATCCTTCCCTCTAAGCC
GTTGGCACCTCTGTGCCACCTCTCACACTGGCTCCAGACACACAGCCTGTGCTTTTGGAGCTGAGATCACTCGCTT
CACCCTCCTCATCTTTGTTCTCCAAGTAAAGCCACGAGGTCGGGGCGAGGGCAGAGGTGATCACCTGCGTGTCCCA
TCTACAGACCTGCAGCTTCATAAAACTTCTGATTTCTCTTCAGCTTTGAAAAGGGTTACCCTGGGCACTGGCCTAG
AGCCTCACCTCCTAATAGACTTAGCCCCATGAGTTTGCCATGTTGAGCAGGACTATTTCTGGCACTTGCAAGTCCC
ATGATTTCTTCGGTAATTCTGAGGGTGGGGGGAGGGACATGAAATCATCTTAGCTTAGCTTTCTGTCTGTGAATGT
CTATATAGTGTATTGTGTGTTTTAACAAATGATTTACACTGACTGTTGCTGTAAAAGTGAATTTGGAAATAAAGTT
ATTACTCTGATTAAA
SEQ ID NO: 4
>Reverse Complement of SEQ ID NO: 3
TTTAATCAGAGTAATAACTTTATTTCCAAATTCACTTTTACAGCAACAGTCAGTGTAAATCATTTGTTAAAACACA
CAATACACTATATAGACATTCACAGACAGAAAGCTAAGCTAAGATGATTTCATGTCCCTCCCCCCACCCTCAGAAT
TACCGAAGAAATCATGGGACTTGCAAGTGCCAGAAATAGTCCTGCTCAACATGGCAAACTCATGGGGCTAAGTCTA
TTAGGAGGTGAGGCTCTAGGCCAGTGCCCAGGGTAACCCTTTTCAAAGCTGAAGAGAAATCAGAAGTTTTATGAAG
CTGCAGGTCTGTAGATGGGACACGCAGGTGATCACCTCTGCCCTCGCCCCGACCTCGTGGCTTTACTTGGAGAACA
AAGATGAGGAGGGTGAAGCGAGTGATCTCAGCTCCAAAAGCACAGGCTGTGTGTCTGGAGCCAGTGTGAGAGGTGG
CACAGAGGTGCCAACGGCTTAGAGGGAAGGATGCCAAGGTCTTAGGGAGGCATGATTGTGGGCTTAGGACCCCTGA
AAGAGGGCAGCAGGCCAAAGCAACCAGATGTCCATATTCCTACGCCTGCACCTGGCTGGGGAGGGAATGAACTAGC
CAGCTGCCTGGGAAAGCCTGTCAGTGGAAAAGAGAAACCCCAAGGGCCTCTAACTCCGTGGCTGCTCCCTCCCTCT
AGCAAATGTGGTTGAAATCATGAAAAGGGTTACGAGGCAGTTTAAGTGCTGCACCCCAAGATCTCCCTTTGCCCAT
GTTAACTATCTTACACATTCCTCCCCCCTCCCCCCATAGCACAACAAGCAATAGCAAACAGGATACAGTCTCACCA
CTGAAGTCAATTTAAATGGAACTATTGATAAAGTGAGTCAGCAGCTTGAAGGAGCCGGCATACAGTATATCCTATC
TAGCCCACCCAAGGACACTGGCTCTGCAGGTGGGAGAAGTGAGGGGAGGGGAGGAGTGCCCAGCCCTGGGGGGATT
GTCCTCATTTAAGATCACAAGCCAGCGTGCCTTTTCAATTTATCTGCCAGCACTGATCACCCTAAACCATGATCTT
AGGCTGGCCCCAAGAGCCTGCCCCACAAGGGGGAGATCCCAGAGCCTTCCGTATAAGAAGGCCCATGGTGCTGAAG
AGCAGGGCACAAGAACTTCAGGAAGAGGAACCGAGGTGCGTGAAGAAATGCAGCCGAAACTGTTGGCAGTAATGAG
GGGGGCATATCTCTAACCACCACCAAATCTACCCCACATTTCCTTCTCCTTCTCAGATCCCTTCAACTTAGGAGAA
TTGCTGGGACTCAGCGAACGGCAGGGAGGCTCTTGGTGGAGAGTTCTGGGCCCAGAGACTTCCTTTCAGGTAAAGC
TCTAGCTGCACACGAAGCTGCCAGCCCCAGGGGAGGCCCTGGATTTCTACTGCCAAGTCCCTCAGGGTTGCCTTTA
ACTGTACCCAAACCAGAAGTGGCAGAATTGGGCCTGAGGCTGCTGAGTTTCTTTAGGCAGCAATGTTTTGCAAAGG
CGGCTTCCCTTTTCTCATGGCAGCAGATGGAGTTTGTGCAAGGTCAGCGGGCTGAGGTGCTCTGGTCAAGGCTTTG
GGAACAGTGTCTCCTGACTTGTCAAGTCATCCTTCCTCAGGCAGGCAGCTTGGGCCTCTAGAGCAGATCCAGGACA
GGCAATTCATCCCAATCCCTGCTGTGGTCGCAGGGCCCTTGGTGGGAGGCTGCGCTGCCCCTCCAGAGGGCGAGCT
TGGAGAGGAACCCAGTCTGAGGGGTGGCTGAGGCTCACGGAGCTTCTGGGAGCTGCAGATCCCCCCAGCTGGCAGT
GGCTTCCTTTTTCTTGTGATGCAGGAGTTGTAAGCCTCCTTTGGGACTGCCATGAGACTTCGGGCTATGACCAGAG
AGAACCATCCTCGCGCCGCAAGCCAGACCAGCCACAAGACCTAGTCTGTGCCCTGACACAGGGAGCCCCAAGGGGA
AGTAGGGAAGGGGACATCATCGCTTCAGTCCTAATCCTGTGCTTCAGGCCTTCGTCACAGCTGAACGGCCTCCTTA
GCTGCTAGAAGCTGGTCTCTGTTGGGTCCCAGGTGCTGAGGAAAGCCTTTCAAAACTTGGGAGGCCCCAGCAGGGT
GGCACCACACAGGCCACACGAGTCCCAGTGTGGGGGTGAGAGACACCTCGTGAGGGTGGGTTAGAAACCTCTTTAC
AAGCATTTCAAGATACATGCGTCCTTTTTTTTTTTTTTTTTTCTTTTCACTATCATAGTCACTCTGGTGAATCCAA
GCATAAACAGACAAATCCAACTACAACTCAACAGGGTGCAGATGGGGAGGGCAGGGCAACATCTATGTATATGTTC
AGCTGCTCCAGCAGAACAGACAGCATGGCTTCCAGCTGGGACTGGGGGAAAAGAACCATTTCCAAGGGGGTGTGTT
CCCCTTTGTCGGGTGTGGAGGGCTGATACTATGCATGTGGAGCTGAGCAGCGGGCTGGGCTGTCTGGGAGGTTGGC
AGCTACAAGCTAGGGTGCAAGTGGGGGACAGCGGGACTGTGGGCCTGCCCTGGGTGCCTTGCCCTTCCATCCTGGT
GCCACCACTGACAACCAAGACACCCAGCCTGCTGCTGTGGGCTCAGCACAGGAAGGGGCCAGGCCTTCTCAGGGGA
AAGGGCTCTCTCCATGTCAACAAGGCAGAAACACCTAGGGTCACAGCTGAGCAGTGCCCTGGCTCACATCTGTGAC
GGGAGGAGGAGACAGGGAACCGAATCAGATCATGAGATTCGTGGTGAGGGTCCCAGTTGGATGAGTGGAACTGAGA
GTGAGAGGCTGGGGTCCCACTCTTGTGCCTGGACTTTGCCTTCCCTTAATTTCACCCTCAGTATGGAGTAGGTACC
TCCTGCAACCAACCAGGGTCATTACTGAGAAGGGGTGGTGAGGCTGGGAATTCGGGACATTGTGACGTGTGATGAG
GGGTATAGGCAGTGATTGGGCTCTCACGGCAGACAACAGCACAGCGGCGCAGACGGGGTGACTGCAGTGGCCGTGG
GAAGGACAGGGGGCTCGGGACCTGCCTCCCAGACCCCCACACACTCCAGAGATGCCAGTGGCCCAGGCTTGGAAAC
GGGTGGACGTCTCCCAAGAGGCACAAGTCCTTACAAAGAGAACTGGTTAGCCCTAAAGTCCCAGGTCTGCAAAGTG
GCCAAAATCATGGCAGCAGTTCCAACCTTCAGAACTCAATAAAACAGGGTTTCTGTGGAGCAGAGGGAAGCCCCTC
AACTCAGGCCCCCTACCCTGCAGGGAGGGAGGAAGAGGCCAGCGCTCTCAAGACATCAAGGTCAGTCTTTTCTAAG
GAGGTCATCCACGAAGTGCCACCCTCCTGCCAGCTTGCCTTCTCTTTTTACCCGCTGTCCCTTCTCCCACAGGCTG
CCCTGCAGAGGGTGGCACACTGACCCACAGCAGGCCCCCACCCCCGGCCACCAAGGACAGGCGGCCGCTCAGACGC
TGCAGGTGGCATAGGCCTTGGCTCTCCCAGCGGCAAGGAGGGGGATGTCTACTCTCCAGCACGTGGCTTCCTCTCC
CACTCCCACTTCTTGTGCTTCCTCTCCCCTCTGCCCAGCCCCTGCCTCGGCCTCCCCCGTGGCCTCCCGCCCCACC
CCAACCCCCGTCACACTCACACAAGGTTGACATCGTCTGCCTGTGGCTCCACGAACACACCAAGTTTCAAATCCTT
TGTTGCTGCCACTGCCTCTGTGACACCCCCACAACAGGGCCAGAGGTGGTTGGCACCCCCAGTCCCTTGAAATCCC
CCAGAAGCAGCTTTCAGAGCCTCTCCTTCTCCCTCTTCTACATGGAGGGGGAAGAAAAAAGAATCAAAAGGAATTG
CCTGAGGAAATGTTGGATGTGGCCATGTTTTTGAATGTTTTTTTTTAAATATTTTATTACTAGCCCACCCATCAAT
TTGGAAAGATGAAATTTGCTCTTACTCCCATCACTGATTTTGAAGTCCCGAGCCAAAGCCGAGTGACAAAAGCAGG
TTAAGTGATTAACCAATTAACCGAACTGCGAGGAGCAGCTGGGGGCAGAGGGCGGGGGCCGGGTCATTATTCTTTT
TTTTTCCACACTCTCTCATTCTCTCCTCTCCACAATTATTGACCGCCCCAGGGGCCTGATCACAAACCCTGCTTGG
CCAGGGAGGCAGACACCTCGTCAGCTAGCGTGGCGAGCTGGGGCGAGTCTACCATGTCGATGCTGCCGGTGGAGGA
GACATTGCTGAGATGCCGTGGAGACGTGTCCCCAGACACCACTGGCGACTTGTACACGATCTCCGCCCCGTGGTCT
GTCTTGGCTTTGGCGTTCTCGCGGAAGGTCAGCTTGTGGGTTTCAATCTTTTTATTTCCTCCGCCAGGGACGTGGG
TGATATTGTCCAGGGACCCAATCTTCGACTGGACTCTGTCCTTGAAGTCAAGCTTCTCAGATTTTACTTCCACCTG
GCCACCTCCTGGTTTATGATGGATGTTGCCTAATGAGCCACACTTGGAGGTCACCTTGCTCAGGTCAACTGGTTTG
TAGACTATTTGCACACTGCCGCCTCCCGGGACGTGTTTGATATTATCCTTTGAGCCACACTTGGACTGGACGTTGC
TAAGATCCAGCTTCTTATTAATTATCTGCACCTTCCCGCCTCCCGGCTGGTGCTTCAGGTTCTCAGTGGAGCCGAT
CTTGGACTTGACATTCTTCAGGTCTGGCATGGGCACGGGGGCTGTCTGCAGGCGGCTCTTGGCGGAAGACGGCGAC
TTGGGTGGAGTACGGACCACTGCCACCTTCTTGGGCTCCCGGGTGGGTGGGGTTGGAAGGGACGGGGTGCGGGAGC
GGCTGCCGGGAGTGCCTGGGGAGCCGGGGCTGCTGTAGCCGCTGCGATCCCCTGATTTTGGAGGTTCACCAGAGCT
GGGTGGTGTCTTTGGAGCGGGCGGGGTTTTTGCTGGAATCCTGGTGGCGTTGGCCTGGCCCTTCTGGCCTGGAGGG
GCTGCTCCCCGCGGTGTGGCGATCTTCGTTTTACCATCAGCCCCCTTGGCTTTTTTGTCATCGCTTCCAGTCCCGT
CTTTGCTTTTACTGACCATGCGAGCTTGGGTCACGTGACCAGCAGCTTCGTCTTCCAGGCTGGGGGTGTCTCCAAT
GCCTGCTTCTTCAGCTGTGGTTCCTTCTGGGATCTCCGTGTGGGGCTGCGCGGCAGCCTGCTTGCCGGGAGCTCCC
TCATCCACTAAGGGTGCTGTCACATCTTCCGCTGTTGGAGTGCTCTTAGCATCAGAGGTTTCAGAGCCCGGTTCCT
CAGATCCGTCCTCAGTGGGGGTCTGCAGGGGAGATTCTTTCAGGCCAGCGTCCGTGTCACCCTCTTGGTCTTGGTG
CATGGTGTAGCCCCCCTGATCTTTCCTGTCCCCCAACCCGTACGTCCCAGCGTGATCTTCCATCACTTCGAACTCC
TGGCGGGGCTCAGCCATCCTGGTTCAAAGTTCACCTGATAGTCGACAGAGGCGAGGACGGGAGAGGACAGCGGAGG
AGGAGAAGGTGGCTGTGGTGGCGGCGGCAGAAGGTGGGCGGTGGCAGCGGCGCTGCTGTTGGTGCCGGAGCTGGTG
GGTGGCGGTGACTGC
SEQ ID NO: 5
>NM_001038609.2 Mus musculus microtubule-associated protein tau (Mapt),
transcript variant 1, mRNA
CCGCCGGCCTCCAGAACGCGCTTTCTCGGCCGCGCGCGCTCTCAGTCTCCGCCACCCACCAGCTCCAGCACCAGCA
GCAGCGCCGCCGCCACCGCCCACCTTCTGCCGCCGCCGCCACAACCACCTTCTCCTCCGCTGTCCTCTTCTGTCCT
CGCCTTCTGTCGATTATCAGGCTTTGAACCAGTATGGCTGACCCTCGCCAGGAGTTTGACACAATGGAAGACCATG
CTGGAGATTACACTCTGCTCCAAGACCAAGAAGGAGACATGGACCATGGCTTAAAAGAGTCTCCCCCACAGCCCCC
CGCCGATGATGGAGCGGAGGAACCAGGGTCGGAGACCTCCGATGCTAAGAGCACTCCAACTGCTGAAGACGTGACT
GCGCCCCTAGTGGATGAGAGAGCTCCCGACAAGCAGGCCGCTGCCCAGCCCCACACGGAGATCCCAGAAGGAATTA
CAGCCGAAGAAGCAGGCATCGGAGACACCCCGAACCAGGAGGACCAAGCCGCTGGGCATGTGACTCAAGCTCGTGT
GGCCAGCAAAGACAGGACAGGAAATGACGAGAAGAAAGCCAAGGGCGCTGATGGCAAAACCGGGGCGAAGATCGCC
ACACCTCGGGGAGCAGCCTCTCCGGCCCAGAAGGGCACGTCCAACGCCACCAGGATCCCGGCCAAGACCACGCCCA
GCCCTAAGACTCCTCCAGGGTCAGGTGAACCACCAAAATCCGGAGAACGAAGCGGCTACAGCAGCCCCGGCTCTCC
CGGAACGCCTGGCAGTCGCTCGCGCACCCCATCCCTACCAACACCGCCCACCCGGGAGCCCAAGAAGGTGGCAGTG
GTCCGCACTCCCCCTAAGTCACCATCAGCTAGTAAGAGCCGCCTGCAGACTGCCCCTGTGCCCATGCCAGACCTAA
AGAATGTCAGGTCGAAGATTGGCTCTACTGAGAACCTGAAGCACCAGCCAGGAGGTGGCAAGGTGCAGATAATTAA
TAAGAAGCTGGATCTTAGCAACGTCCAGTCCAAGTGTGGCTCGAAGGATAATATCAAACACGTCCCGGGTGGAGGC
AGTGTGCAAATAGTCTACAAGCCGGTGGACCTGAGCAAAGTGACCTCCAAGTGTGGCTCGTTAGGGAACATCCATC
ACAAGCCAGGAGGTGGCCAGGTGGAAGTAAAATCAGAGAAGCTGGACTTCAAGGACAGAGTCCAGTCGAAGATTGG
CTCCTTGGATAATATCACCCACGTCCCTGGAGGAGGGAATAAGAAGATTGAAACCCACAAGCTGACCTTCAGGGAG
AATGCCAAAGCCAAGACAGACCATGGAGCAGAAATTGTGTATAAGTCACCCGTGGTGTCTGGGGACACATCTCCAC
GGCACCTCAGCAATGTGTCTTCCACGGGCAGCATCGACATGGTGGACTCACCACAGCTTGCCACACTAGCCGATGA
AGTGTCTGCTTCCTTGGCCAAGCAGGGTTTGTGATCAGGCTCCCAGGGCAGTCAATAATCATGGAGAGAAGAGAGA
GTGAGAGTGTGGAAAAAAAAAAAAAAAAAGAATGATCTGGCCCCTTGCCCTCTGCCCTCCCCGCTGCTCCTCATAG
ACAGGCTGACCTGCTTGTCACCTAACCTGCTTTTGTGGCTCGGATTTGGCTCGGGACTTCAAAATCAGTGATGGGA
AAAGTACATTTCATCTTTCCAAATTGATTTGTGGGCTAAAAATAAAACATATTTAAGGGAAAAAAAAACATGTAAA
AACATGGCCAAAAAATTTCCTTGGGCAATTGCTAATTGATTTCCCCCCCCTGACCCCGCCCTCCCTCTCTGAGTAT
TAGAGGGTGAAGAAGGCTCTGGAGGCTGCTTCTGGGGAGTGGCTGAGGGACTAGGGCAGCTAATTGCCCATAGCCC
CATCCTAGGGGCTTCAGGGACAGTGGCAGCAATGAGAGATTTGAGACTTGGTGTGTTCGTGGGGCCGTAGGCAGGT
GCTGTTAACTTGTGTGGGTGTGAGTGGGGACTGAAACAGCGACAGCGAAGGCTGAGAGATGGATGGGTGGACTGAG
TTAGAGGACAGAGGTGAGGAAGGCAGGTTGGGAGAGGGGACACTGGCTCCTTGCCAAGTAGCTTGGGGAGGACAGG
GTGCTGCAGCTGCCTGCAGCAGTCCTAGCTAGCTCAGATGCCTGCTTGATAAAGCACTGTGGGGGTAACGTGGGTG
TGTGTGCCCCTTCTGCAGGGCAGCCTGTGGGAGAAGGGGTATTGGGCAGAAGGAAGGTAAGCCAGCAGGTGGTACC
TTGTAGATTGGTTCTCTTGAAGGCTGCTCTTGACATCCCAGGGCACTGGCTTCTTCCTCCCTCCCCGCAAGGTGGG
AGGTCCTGAGCGAGGTGTTTCCCTTCGCTCCCACAGGAAAAGCTGCTTTACTGAGTTCTCAAGTTTGGAACTACAG
CCATGATTTGGCCACCATTACAGACCTGGGACTTTAGGGCTAACCAGATCTTTGTAAGGACTTGTGCCTCTTGGGG
GACCTCTGCCTGTTCTCATGCTTGGCCCTCTGGCACTTCTGTAGTGGGAGGGATGGGGGGTGGTATTCTGGGATGT
GGGTCCCAGGCCTCCCATCCCTCACACAGCCACTGTATCCCCTCTCTCTGTCCTATCATGCCCACGTCTGCCACGA
GAGCTAGTCACTGCCGTCCGTACATCACGTCTCACTGTCCTGAGTGCCATGCCTCTCCCAGCCCCCATCCCTGGCC
CCTGGGTAGATATGGGCAATATCTGCTCTACACTAGGGGTTGGAGTCCAGGGAAGGCAAAGATTTGGGCCTCAGTC
TCTAGTCCTACGTTCCACGAATCCAACCAGTGTGCCTCCCACAAGGAACCTTACGACCTTGTTTGGTTCACTCCAT
TACTTCCTATCCTGGATGGGAACTGGTGTGTGCCTGCCTGGGGATGACCTTGGACCTCTGCCTTTTCTTTTATCTA
AGTGGATGCCTCCTAGGCCTGACTCCTTGTGTTGAGCTGGAGGCAGCCAAGTCAGGTGCCAATGTCTTGGCATCAG
TAAGAACAGTCAAGAGTCCCAGGGCAGGGCCACACTTCTCCCATCTTTCGCTTCCACCCCAGCTTGTGATCGCTAG
CCTCCCAGAGCTCAGCTGCCATTAAGTCCCCATGCACGTAATCAGTCTCCACACCCCAGTTTGGGGAACATACCCC
CTTGATTGAAGTGTTTTTTTCCTCCGGTCCCATGGAAACCATGCTGCCTGCCCTGCTGGAGCAGACGGCCACCTCC
ATAGATGCAGCCCTTTCTTTCCCGTCTTCGCCCTGTTACGTTGTAGTTGGATTTGTCTGTTTGTCTGGGTTCACCA
GAGTGACTATGATAGTGAAAAGAAAAGAAAGAAAAAGAAAAAAAAAAAAAAAAAGAAAAAGAAAAAGGAAAAAAAA
AAGGACGCATGTATCTTGAAATATTTGTCAAAAGGTTCTAGCCCACCACGTGATGGAGAGTCTGGATATCTCCTTC
CTGACGTGGCTCCAGGCCAGTGCAGTGCTAACCTGCTGGGACATCCCATGTTTTGAAGGGTTTCTTCTGCATCTGG
GACCTCACAGACACTGGATTGTGACATTGGAGGTCTGTGACATTGGAGGTCAATGGCATTGGCCAAGGCCTGAAGC
ACAGGACCAGCTAGAGGCAGCAGGCTCCGAGTGCCAGGGAGAGCTTGTGGCTGGCCTGTTTTGTATGAAGATGGTC
CTTTCTGATCACGACTTCAAATCCCACAGTAGCCCTGAAAGACATCTAAGAACTCCTGCATCACAAGAGAAAAGGA
CACCAGTACCAGCAGGGAGAGCTGTGACCCTAGAAATTCCATGACGACCCAGTAGATATCCTTGGGCCCTCTCCAA
GCCTGGGCCTTTTCACCATAGAGTTTGGGATGGACTGTCCCACTGATGAAGGGGACATCTTAGGAGACTCCCTTGG
TTTCCAAGCTGTCAGCCCCCTGAACTTGCACGACCTCCTACAGCTTCAGGGACTAGGCCTTTGAAGATTAGGAACC
TCAGGCCCACATCAGCCACTTCTGATGTACAGTTAAGGACAATGTGGAGACTAGGAGGAAGCAGCCAGCCTTTCCC
ATTAAAGAACTCTTGAGTGCCCAGGGCTACCTATTGTGAGCTTCCCCACTGATAAGACTTTAGCTGTCCATAGAAG
TGAGTCCGAGGGAGGAAAAGTGTGGTTTCTTCATCATGGTTACCTGTCGTGGTTCTCTCTCTTACACCCATTTACC
CATCCCGCAGTTCCTGTCCTTGAATGGGGGGTGGGGTGCTCTGCCTATCTCTTGTGGGGTGATCAGCCCAAAAATC
ATGATTTGGAGTGATCTGATCAGTGCTGATAGGCAGTTTACAAAGGGATTCTGGCTTGTGACTTCAGTGAGGACAA
TCCCCCAGGGCCCTTTCTTTCCATGCCTCTCCAACTCAGAGCCAATGTCTTTGGGTGGGCTAGATAGATAGGGCAT
ACAATTGGCCTGGTTCCTCCAAGCTCTTAATTCACTTTATCAATAGTTCCATTTAAATTGACTTCAATGATAAGAG
TGTATCCCATTTGAGATTGCTTGCGTTGTGGGGGAGGGGGAGGAGGAACACATTAAGATAATTCACATGGGCAAAG
GGAGGTCTTGGAGTGTAGCCGTTAAGCCATCTTGTAACCCCATTCATGATTTTGACCACCTGCTAGAGAGAAGAGG
TGCCAAGAGACTAGAACTTGGAGGCTTGGCTGTCCCACTAATAGGCTTTCGCAAGGCAGAGGTAGCCAGCTAGGTC
CCTGCCTTCCCAGCCAGGTACAGCTCTCAGGTTTGTGGAGGTAATCTGTGAACTTCTCTTCCTGCTGCCTTCTTGT
GATGTCCAGAGCCCACAGTCAAATACCTCCTAAGAACCCTGGCTTCCTTCCCTCTAATCCACTGGCACATGACTAT
CACCTCTGGATTGACCTCAGATCCATAGCCTACACACTGCTAGCAGTGGCCAAGATCACTTCCTTTATCTCCATCT
GTTCTGTTCTCCAGGAAAGTAAGTGGGGATGAGGGTGGAGGTGGTAATCAACTGTAGATCTGTGGCTTTATGAGCC
TTCAGACTTCTCTCTGGCTTCTTCTGGAAGGGTTACTATTGGCAGTATTGCAATCTCACCCTCCTGATGAACTGTA
GCCTGTGCCGTTACTGTGCTGGGCATGATCTCCAGTGCTTGCAAGTCCCATGATTTCTTTGGTGATTTTGAGGGTG
GGGGGAGGGACACAAATCAGCTTAGCTTAGCTTCCTGTCTGTGAATGTCCATATAGTGTATTGTGTTTTAACAAAT
GATCTACACTGACTGTTGCTGTAAAAGTGAATTTGGAAATAAAGTTATTACTCTGAATAAAAAAAAAAAAAAAAAA
SEQ ID NO: 6
>Reverse Complement of SEQ ID NO: 5
TTTTTTTTTTTTTTTTTTATTCAGAGTAATAACTTTATTTCCAAATTCACTTTTACAGCAACAGTCAGTGTAGATC
ATTTGTTAAAACACAATACACTATATGGACATTCACAGACAGGAAGCTAAGCTAAGCTGATTTGTGTCCCTCCCCC
CACCCTCAAAATCACCAAAGAAATCATGGGACTTGCAAGCACTGGAGATCATGCCCAGCACAGTAACGGCACAGGC
TACAGTTCATCAGGAGGGTGAGATTGCAATACTGCCAATAGTAACCCTTCCAGAAGAAGCCAGAGAGAAGTCTGAA
GGCTCATAAAGCCACAGATCTACAGTTGATTACCACCTCCACCCTCATCCCCACTTACTTTCCTGGAGAACAGAAC
AGATGGAGATAAAGGAAGTGATCTTGGCCACTGCTAGCAGTGTGTAGGCTATGGATCTGAGGTCAATCCAGAGGTG
ATAGTCATGTGCCAGTGGATTAGAGGGAAGGAAGCCAGGGTTCTTAGGAGGTATTTGACTGTGGGCTCTGGACATC
ACAAGAAGGCAGCAGGAAGAGAAGTTCACAGATTACCTCCACAAACCTGAGAGCTGTACCTGGCTGGGAAGGCAGG
GACCTAGCTGGCTACCTCTGCCTTGCGAAAGCCTATTAGTGGGACAGCCAAGCCTCCAAGTTCTAGTCTCTTGGCA
CCTCTTCTCTCTAGCAGGTGGTCAAAATCATGAATGGGGTTACAAGATGGCTTAACGGCTACACTCCAAGACCTCC
CTTTGCCCATGTGAATTATCTTAATGTGTTCCTCCTCCCCCTCCCCCACAACGCAAGCAATCTCAAATGGGATACA
CTCTTATCATTGAAGTCAATTTAAATGGAACTATTGATAAAGTGAATTAAGAGCTTGGAGGAACCAGGCCAATTGT
ATGCCCTATCTATCTAGCCCACCCAAAGACATTGGCTCTGAGTTGGAGAGGCATGGAAAGAAAGGGCCCTGGGGGA
TTGTCCTCACTGAAGTCACAAGCCAGAATCCCTTTGTAAACTGCCTATCAGCACTGATCAGATCACTCCAAATCAT
GATTTTTGGGCTGATCACCCCACAAGAGATAGGCAGAGCACCCCACCCCCCATTCAAGGACAGGAACTGCGGGATG
GGTAAATGGGTGTAAGAGAGAGAACCACGACAGGTAACCATGATGAAGAAACCACACTTTTCCTCCCTCGGACTCA
CTTCTATGGACAGCTAAAGTCTTATCAGTGGGGAAGCTCACAATAGGTAGCCCTGGGCACTCAAGAGTTCTTTAAT
GGGAAAGGCTGGCTGCTTCCTCCTAGTCTCCACATTGTCCTTAACTGTACATCAGAAGTGGCTGATGTGGGCCTGA
GGTTCCTAATCTTCAAAGGCCTAGTCCCTGAAGCTGTAGGAGGTCGTGCAAGTTCAGGGGGCTGACAGCTTGGAAA
CCAAGGGAGTCTCCTAAGATGTCCCCTTCATCAGTGGGACAGTCCATCCCAAACTCTATGGTGAAAAGGCCCAGGC
TTGGAGAGGGCCCAAGGATATCTACTGGGTCGTCATGGAATTTCTAGGGTCACAGCTCTCCCTGCTGGTACTGGTG
TCCTTTTCTCTTGTGATGCAGGAGTTCTTAGATGTCTTTCAGGGCTACTGTGGGATTTGAAGTCGTGATCAGAAAG
GACCATCTTCATACAAAACAGGCCAGCCACAAGCTCTCCCTGGCACTCGGAGCCTGCTGCCTCTAGCTGGTCCTGT
GCTTCAGGCCTTGGCCAATGCCATTGACCTCCAATGTCACAGACCTCCAATGTCACAATCCAGTGTCTGTGAGGTC
CCAGATGCAGAAGAAACCCTTCAAAACATGGGATGTCCCAGCAGGTTAGCACTGCACTGGCCTGGAGCCACGTCAG
GAAGGAGATATCCAGACTCTCCATCACGTGGTGGGCTAGAACCTTTTGACAAATATTTCAAGATACATGCGTCCTT
TTTTTTTTCCTTTTTCTTTTTCTTTTTTTTTTTTTTTTTCTTTTTCTTTCTTTTCTTTTCACTATCATAGTCACTC
TGGTGAACCCAGACAAACAGACAAATCCAACTACAACGTAACAGGGCGAAGACGGGAAAGAAAGGGCTGCATCTAT
GGAGGTGGCCGTCTGCTCCAGCAGGGCAGGCAGCATGGTTTCCATGGGACCGGAGGAAAAAAACACTTCAATCAAG
GGGGTATGTTCCCCAAACTGGGGTGTGGAGACTGATTACGTGCATGGGGACTTAATGGCAGCTGAGCTCTGGGAGG
CTAGCGATCACAAGCTGGGGTGGAAGCGAAAGATGGGAGAAGTGTGGCCCTGCCCTGGGACTCTTGACTGTTCTTA
CTGATGCCAAGACATTGGCACCTGACTTGGCTGCCTCCAGCTCAACACAAGGAGTCAGGCCTAGGAGGCATCCACT
TAGATAAAAGAAAAGGCAGAGGTCCAAGGTCATCCCCAGGCAGGCACACACCAGTTCCCATCCAGGATAGGAAGTA
ATGGAGTGAACCAAACAAGGTCGTAAGGTTCCTTGTGGGAGGCACACTGGTTGGATTCGTGGAACGTAGGACTAGA
GACTGAGGCCCAAATCTTTGCCTTCCCTGGACTCCAACCCCTAGTGTAGAGCAGATATTGCCCATATCTACCCAGG
GGCCAGGGATGGGGGCTGGGAGAGGCATGGCACTCAGGACAGTGAGACGTGATGTACGGACGGCAGTGACTAGCTC
TCGTGGCAGACGTGGGCATGATAGGACAGAGAGAGGGGATACAGTGGCTGTGTGAGGGATGGGAGGCCTGGGACCC
ACATCCCAGAATACCACCCCCCATCCCTCCCACTACAGAAGTGCCAGAGGGCCAAGCATGAGAACAGGCAGAGGTC
CCCCAAGAGGCACAAGTCCTTACAAAGATCTGGTTAGCCCTAAAGTCCCAGGTCTGTAATGGTGGCCAAATCATGG
CTGTAGTTCCAAACTTGAGAACTCAGTAAAGCAGCTTTTCCTGTGGGAGCGAAGGGAAACACCTCGCTCAGGACCT
CCCACCTTGCGGGGAGGGAGGAAGAAGCCAGTGCCCTGGGATGTCAAGAGCAGCCTTCAAGAGAACCAATCTACAA
GGTACCACCTGCTGGCTTACCTTCCTTCTGCCCAATACCCCTTCTCCCACAGGCTGCCCTGCAGAAGGGGCACACA
CACCCACGTTACCCCCACAGTGCTTTATCAAGCAGGCATCTGAGCTAGCTAGGACTGCTGCAGGCAGCTGCAGCAC
CCTGTCCTCCCCAAGCTACTTGGCAAGGAGCCAGTGTCCCCTCTCCCAACCTGCCTTCCTCACCTCTGTCCTCTAA
CTCAGTCCACCCATCCATCTCTCAGCCTTCGCTGTCGCTGTTTCAGTCCCCACTCACACCCACACAAGTTAACAGC
ACCTGCCTACGGCCCCACGAACACACCAAGTCTCAAATCTCTCATTGCTGCCACTGTCCCTGAAGCCCCTAGGATG
GGGCTATGGGCAATTAGCTGCCCTAGTCCCTCAGCCACTCCCCAGAAGCAGCCTCCAGAGCCTTCTTCACCCTCTA
ATACTCAGAGAGGGAGGGCGGGGTCAGGGGGGGGAAATCAATTAGCAATTGCCCAAGGAAATTTTTTGGCCATGTT
TTTACATGTTTTTTTTTCCCTTAAATATGTTTTATTTTTAGCCCACAAATCAATTTGGAAAGATGAAATGTACTTT
TCCCATCACTGATTTTGAAGTCCCGAGCCAAATCCGAGCCACAAAAGCAGGTTAGGTGACAAGCAGGTCAGCCTGT
CTATGAGGAGCAGCGGGGAGGGCAGAGGGCAAGGGGCCAGATCATTCTTTTTTTTTTTTTTTTTCCACACTCTCAC
TCTCTCTTCTCTCCATGATTATTGACTGCCCTGGGAGCCTGATCACAAACCCTGCTTGGCCAAGGAAGCAGACACT
TCATCGGCTAGTGTGGCAAGCTGTGGTGAGTCCACCATGTCGATGCTGCCCGTGGAAGACACATTGCTGAGGTGCC
GTGGAGATGTGTCCCCAGACACCACGGGTGACTTATACACAATTTCTGCTCCATGGTCTGTCTTGGCTTTGGCATT
CTCCCTGAAGGTCAGCTTGTGGGTTTCAATCTTCTTATTCCCTCCTCCAGGGACGTGGGTGATATTATCCAAGGAG
CCAATCTTCGACTGGACTCTGTCCTTGAAGTCCAGCTTCTCTGATTTTACTTCCACCTGGCCACCTCCTGGCTTGT
GATGGATGTTCCCTAACGAGCCACACTTGGAGGTCACTTTGCTCAGGTCCACCGGCTTGTAGACTATTTGCACACT
GCCTCCACCCGGGACGTGTTTGATATTATCCTTCGAGCCACACTTGGACTGGACGTTGCTAAGATCCAGCTTCTTA
TTAATTATCTGCACCTTGCCACCTCCTGGCTGGTGCTTCAGGTTCTCAGTAGAGCCAATCTTCGACCTGACATTCT
TTAGGTCTGGCATGGGCACAGGGGCAGTCTGCAGGCGGCTCTTACTAGCTGATGGTGACTTAGGGGGAGTGCGGAC
CACTGCCACCTTCTTGGGCTCCCGGGTGGGCGGTGTTGGTAGGGATGGGGTGCGCGAGCGACTGCCAGGCGTTCCG
GGAGAGCCGGGGCTGCTGTAGCCGCTTCGTTCTCCGGATTTTGGTGGTTCACCTGACCCTGGAGGAGTCTTAGGGC
TGGGCGTGGTCTTGGCCGGGATCCTGGTGGCGTTGGACGTGCCCTTCTGGGCCGGAGAGGCTGCTCCCCGAGGTGT
GGCGATCTTCGCCCCGGTTTTGCCATCAGCGCCCTTGGCTTTCTTCTCGTCATTTCCTGTCCTGTCTTTGCTGGCC
ACACGAGCTTGAGTCACATGCCCAGCGGCTTGGTCCTCCTGGTTCGGGGTGTCTCCGATGCCTGCTTCTTCGGCTG
TAATTCCTTCTGGGATCTCCGTGTGGGGCTGGGCAGCGGCCTGCTTGTCGGGAGCTCTCTCATCCACTAGGGGCGC
AGTCACGTCTTCAGCAGTTGGAGTGCTCTTAGCATCGGAGGTCTCCGACCCTGGTTCCTCCGCTCCATCATCGGCG
GGGGGCTGTGGGGGAGACTCTTTTAAGCCATGGTCCATGTCTCCTTCTTGGTCTTGGAGCAGAGTGTAATCTCCAG
CATGGTCTTCCATTGTGTCAAACTCCTGGCGAGGGTCAGCCATACTGGTTCAAAGCCTGATAATCGACAGAAGGCG
AGGACAGAAGAGGACAGCGGAGGAGAAGGTGGTTGTGGCGGCGGCGGCAGAAGGTGGGCGGTGGCGGCGGCGCTGC
TGCTGGTGCTGGAGCTGGTGGGTGGCGGAGACTGAGAGCGCGCGCGGCCGAGAAAGCGCGTTCTGGAGGCCGGCGG
SEQ ID NO: 7
>XM_005584540.1 PREDICTED: Macaca fascicularis microtubule associated
protein tau (MAPT), transcript variant X13, mRNA
GCCGAGCGGCAGGGCGCTCGCGCGCGCCCACTGGTGGCCGGAGGAGAAGGCTCCCGCGGAGGCCGGGCTGCCCGCC
CCCTCCCCTGGGGAGGCTCGCGCTCCCGCTGCTCGCGCCTGCGCCGCCTGCCGGCCTCGGGAACGCGCCCTCTTCC
CCGGCGCGCGCCCTCGCAGTCACCGCCACCCACCAGCTCCGGCACCAACAGCAGCGCCGCTGCCACCGCCCACCTT
CTGCCGCCGCCACCACAGCCACCTTCTCCTCCTCCGCTGTCCTCTCCCGTCCTCGCCTCTGTCGACTATCAGGCGA
GCCTTGAACCAGGATGGCTGAGCCCCGCCAGGAGTTCGATGTGATGGAAGATCACGCTGGGACGTACGGGTTGGGG
GACAGGAAAGATCAAGAGGGCTACACCATGCTCCAAGACCAAGAGGGTGACACGGACGCTGGCCTGAAAGAATCTC
CCCTGCAGACCCCCGCTGAGGATGGATCTGAGGAACTGGGCTCTGAAACCTCTGATGCTAAGAGCACTCCAACGGC
GGAAGATGTGACAGCGCCCTTAGTGGATGAGAGAGCTCCCGGCGAGCAGGCTGCCGCCCAGCCCCACATGGAGATC
CCAGAAGGAACCACAGCTGAGGAAGCAGGCATCGGAGACACCCCCAGCCTGGAAGACGAAGCTGCTGGTCACGTGA
CCCAAGCTCGCATGGTCAGTAAAAGCAAAGACGGGACTGGAAGCGATGACAAAAAAGCCAAGGGGGCTGATGGGAA
AACGAAGATCGCCACACCCCGGGGAGCGGCCCCTCCAGGCCAGAAGGGCCAAGCCAACGCCACCAGGATTCCAGCA
AAAACCCCGCCCGCCCCAAAGACACCACCCAGCTCTGGTGAACCTCCAAAATCAGGGGATCGCAGTGGCTACAGCA
GCCCCGGCTCCCCGGGCACTCCCGGCAGCCGCTCCCGCACCCCGTCCCTTCCAACCCCTCCAGCCCGGGAGCCCAA
GAAGGTGGCGGTGGTCCGTACTCCACCTAAGTCGCCGTCTTCCGCCAAGAGCCGCCTGCAGACAGCCCCCGTGCCC
ATGCCAGACCTGAAGAACGTCAAGTCCAAGATCGGCTCCACCGAGAACCTGAAGCACCAGCCGGGAGGCGGGAAGG
TGCAGATAATTAATAAGAAGCTGGATCTTAGCAACGTCCAGTCCAAGTGTGGCTCAAAGGATAATATCAAACACGT
CCCGGGAGGCGGCAGTGTGCAAATAGTCTACAAACCAGTTGACCTGAGCAAGGTGACCTCCAAGTGTGGCTCATTA
GGCAACATCCATCATAAACCAGGAGGTGGCCAGGTGGAAGTAAAATCTGAGAAGCTGGACTTCAAGGACAGAGTGC
AGTCGAAGATCGGGTCCCTGGACAATATCACCCATGTCCCTGGCGGAGGAAATAAAAAGATTGAAACCCACAAGCT
GACCTTCCGCGAGAACGCCAAAGCCAAGACAGACCACGGGGCGGAAATCGTGTACAAGTCGCCGGTGGTGTCTGGG
GACACGTCTCCACGGCACCTCAGCAATGTCTCCTCCACCGGCAGCATCGACATGGTAGACTCGCCCCAGCTCGCCA
CGCTAGCCGACGAGGTGTCTGCCTCCCTGGCCAAGCAGGGTTTGTGATCAGGCCCCCGGGGCGGTCAATAATCGTG
GAGAGAAGAGAGAGTGAGAGTGTGGAAAAAAAAAGAATAATGACCCGGCCCCGCCCTCTGCCCCCAGCTGCTCCTC
GCAGTTCGGTTAATCGGTTCATCACTTAACCGGCTTTTATCGCTCGGCTTTGGCTCGGGACTTCAAAATCAGTGAT
GGGAATAAGAGCAAATTGCATCTTTCCAAATTGATCGGTGGGCTAATAATAAAATATTTTTTAAAAAACATTCAAA
AACATGGCCACACCCAACATTTCCTCGGGCAATTCCTTTTGATTCTTTTTTTTTCCCCCTCCATGTAGAAGAGGGA
GAAGGAGAGGCTGTGAAAGCTGCTTCGGGGGGATTTCAAGAGACTGGGGGTGCCCACCGCCTCTGGCCCTGTCGTG
GGGGTGTCACAGAGGCAGCGGCAGCAACAAAGGATTTGAAACTTGGTGTGTTCGTGGAGCCACAGGCAGACGATGT
CAACCTTGTGTGAGTGTGACGGGTGGGGGTGGGGGGGGAGGCCATGGGGGAGGCCAAGGCAGGGGCTGGGCAGAGG
GGAGAGGAAGGACGAGAAGGGGGAGTGGGAGAGGAAGCCACATGCTGGAGAGGAGATGCCCTCCTCCGCGCCACTG
GGAGGGCCAAGGCCTCCGCCACCTGCAGTGTCTCAGACTGAGCGGCTGCCTGTCCTTGGTGGCCAGGGTCTGCTGC
GAGTTGATGTGCCACCCTCTGCAGGGCAGCCTGTGGGAGAAGGGGCGGCGGGTAAGAAGAGAAGGCAAGCTGGCGG
GAGGGTGGCACCCCGTGGATGACCTCCTTGGAAAAGACTGACCTTGATGTCGGAGGGCGCTGGCCTCTTCCTCCCT
CCCTGCAGGGTAGGGGGCCTGAGCCGAGGGGCTTCCCTCTGCTCCACAGAAACCCTGTTTTATTGAGTTCTGAAGG
TTGGAACTGCAGCCATGATTTTGGCCACTTTGCAGACCTGGGACTTTAGGGCTAACCAGTTCTCTTTGTAAGGACT
TGTGCCTCTTGGGAGACGTCCACCCGTTTCCAAGCCTGGGCCACCGGCATCTCTGGAGTGTGCAGGGGTCTGGGAG
GCGGGTCCCGAGCCCCCTGTCCTTCCCACGGCCACTGCAGTCACCCCTGTCTGCCCCACTGTGCTGTCGTCTGCCA
TGAGAACCCAGTCACTGCCTATACCCCTCATCACGTCACAATGTCCAAATTCCCAGCCTCACCACCCCCCTTCTCA
GTAAGGACCCTGGTTGGCTGTGGGAGGCACCTACTCCATACTGAGGGTGAAATTAAGGGAAGGTAAAGTCCAGGCA
CAAGAGTGGGACCCCAGCCTCTCACTCTCAGTTCCACTCATCCAACTGGGTCCCTCACCACGAATCTCACGACCTG
ATTCGGTTCCCTGCCTCCTCCTCCCATCACAGATGTGAGCCAGGGCACTGCTCAGCTGTGACCCTCGGTGTTTCTG
CCTTGTTGACATAGAGAGAGCCCTTTCCCCCCGAGAAGGCCTGGCCCCTTCCTGTGCTGAGCCCGCAGCAGGAGGC
TGGGTGTCCTGGTTGTCGGTGACGGCACCAGGATGGGCGGGCAAGGCACCCAGGGCAGGCCCACAGTCCCGCTGTC
CCCCACTTGCACCCCAGCTTGTGGCTGCCAGCCTCCCAGACAGCCCAGCCCGCTGCTCAGCTCCACATGCATAGAA
TCAGCCCTCCACATCCCAAAAAGGGGAACACACCCCCTTCGAAATGGTTTTCTCCCCGGTCCCAGCTGGAAGCCAT
GCTGTCTGTTCTGCTGGAGCAGCTGAACATATACATAGATGTTGCCCTGCCCTCCCCATCTGCACCCTGTTGCGTT
GTAGTTGGATTTGTCTGTTTATGCTTGGATTCACCAGAGTGACTATGATAGTGAAAAGAAAAAAAAAAAAAAAAAA
AGGACGCATGTATCTTGAAATGCTTGTAAAGAGGTTTCTAACCCACCCTCACAAGGTGTCTCTCACCCCCACGCTG
GGACGCGTGTGGCCTGTGTGGCGCCGCCCTGCTGGGGCCTCCCAAGGTTTGAAAGGCTTTCCTCAGCATCCGGGAC
CCAACAGAGACCAGATTCTAGCATCTAAGGAGGCCGTTCAGCTGTGAAGAAGGCCTGAAGCACAGGATTAGGACTG
AAGCGATGACATCTCCTTCCCTACTTCCCCTTGGGGCTCTCTGTGTCAGGGCAGAGAGTAGGTCTTGTGGCTGGTC
TGGCTTGCGGCACGAGGATGGTTCTCTCTGGTCACAGCCCGAAGTCCCACAGCAGTCCTAAAGGAGGCTTACAACT
CCTGCATCACAAGAAGAAGGAAGCCAGTGCCAGCTGGGGGGATCTGCAGCTCCCAGAAGCTCCATGAGCCTCAGCC
ACCCCGCAGACTGGGTTCCTCGCCAAGCTCGCCCTCTGGAGGGGCAGCCAGCCTCCCACCAAGGGCCCTGCGACCA
CAGCAGGGATTGGGATGAATGGCCTATCCTGGATCTGCTCCAGAGGCCCGAGCCACCTGCCTGAGGAAGGATAAGT
CAGGAGACACCGTTCCCAAAGCCTTGACCAGAGCACCTCAGCCCACTGACCTTGCACAAACTCCATCTGCTGCCAT
GAGAAAAGGGAAGCCGCCTTTGCAAAAAATTGCTGCCTAAAGAAACTCAGCAGCCTCAGGCTCAATTCTGCCGCTT
CTGGTTTGGGTACAGTTAAAGGCAACCCTGAGGGACTTGGCAGTAGAAATCCAGGGCATCCCCTAGGGCTGGCAAC
TTCGTGTGCAGCTAGAGCTTTCCCTGCAAGAAGTTTCTGGGCCCAGAACTCTCCACCAGGAAGCTCCCTGCTGTTC
GCTAAGTCCCAGCAATTCTCTAAGTGAAGGGATCTGAGAATGAGGAGGAAATGTGGGGTAGAGATTTGGTGGTGGT
TAGAGACATGCCCCCCTCATTACTGCCAACAGTTTCGGCTGCATTTTTCACGTACCTCGGTTCCTCTTCCTGAAGT
TCTTGTGCCCTGCTCTTCAGCACCGTGGGCCTTATCCGGTAGGCTCTGGGATCTCCCCCTTGTGGGGCAGGCTCTT
GGGGCCAGCCTAAGATCATGGTTTAGGGTGATCAGTGCTGGCAGATAAATTGCAAAGGCACGCTGGCTTGTGACCT
CAAATGACAATCCCCCCAGGGCTGGGCACTCCTCCCCTCCCCTCACTTCTCCCACCTGCAGAGCCAGTGTCCGTGG
GTGGGCTAGATAGGATATACTGTATGCCGGCTCCTTCAAGCTGTTGACTCACTTTATCAATAGTTCCATTTAAATT
GACTTCAATGGTGAGACTGTATCCTGTTTGCTATTGCTTATTGTGCTATGGGGGGAGGGGGGAGGAATGTGTAACA
TAGTTAACATGGGTAAAGGGAGATCTTGGGGTGCAGCACTTCAATTGCCTCGTAACCCTTTTCATCATTTCAACCA
CATTTGCTAAAGGGAGGGAGCAGCCACGCGGTTAGAGGCCCTTGGGGTTTCTCTTTTCCACTGACAGCCTTTCCCA
GGCAGCTGGCCAGTTCCCCATTCCCTCCCCAGCCAGGTGCAGGCGTAGCAATATGGACATCTGGTTGCTTTGGCCT
GCTGCCCTCTTTCAGGGGTCCTAAGCCCACAATCATGCCTCCCTAAGACCCTGGCATCCTTCCTTTTAAGCCGTTG
GCACCTCTGTGCCACCTCTCACACTGGCTCCAGACACAGCCTGTGCTTCTGGCAGCTGAGATCACTCACTTCCCCC
TCCTCATCTTTGTTGGAGCTCCAAGTCAAGCCACGAGGTCAGGGCGAGGGCAGAGGTGGTCACCAGCGTGTCCCAT
CTACAGACCTGTGGCTTCGTAAGACTTCTGATTTCTCTTCAGCTTTGAAAAGGGTTACCCTGGGCACTGGCCTAGA
GTCTCACCTCCTAATAGACTTACCCCCATGAGTTTGCCATGTTGAGCAGGACAATTTCTGGCACTTGCAAGTCCCA
TGATTTCTTCGGTAATTGTGAGGGTGGGGGGAGGGACATGAAATCATCTTAGCTTAGCTTCCTGTCTGTGAATGTC
TATATAGTGTATTGTGTGTTTTAACAAATGATTTACACTGACTGTTGCCGTAAAAGTGAATTTGGAAATAAAGTTA
TTACTCTGATTAAA
SEQ ID NO: 8
>Reverse Complement of SEQ ID NO: 7
TTTAATCAGAGTAATAACTTTATTTCCAAATTCACTTTTACGGCAACAGTCAGTGTAAATCATTTGTTAAAACACA
CAATACACTATATAGACATTCACAGACAGGAAGCTAAGCTAAGATGATTTCATGTCCCTCCCCCCACCCTCACAAT
TACCGAAGAAATCATGGGACTTGCAAGTGCCAGAAATTGTCCTGCTCAACATGGCAAACTCATGGGGGTAAGTCTA
TTAGGAGGTGAGACTCTAGGCCAGTGCCCAGGGTAACCCTTTTCAAAGCTGAAGAGAAATCAGAAGTCTTACGAAG
CCACAGGTCTGTAGATGGGACACGCTGGTGACCACCTCTGCCCTCGCCCTGACCTCGTGGCTTGACTTGGAGCTCC
AACAAAGATGAGGAGGGGGAAGTGAGTGATCTCAGCTGCCAGAAGCACAGGCTGTGTCTGGAGCCAGTGTGAGAGG
TGGCACAGAGGTGCCAACGGCTTAAAAGGAAGGATGCCAGGGTCTTAGGGAGGCATGATTGTGGGCTTAGGACCCC
TGAAAGAGGGCAGCAGGCCAAAGCAACCAGATGTCCATATTGCTACGCCTGCACCTGGCTGGGGAGGGAATGGGGA
ACTGGCCAGCTGCCTGGGAAAGGCTGTCAGTGGAAAAGAGAAACCCCAAGGGCCTCTAACCGCGTGGCTGCTCCCT
CCCTTTAGCAAATGTGGTTGAAATGATGAAAAGGGTTACGAGGCAATTGAAGTGCTGCACCCCAAGATCTCCCTTT
ACCCATGTTAACTATGTTACACATTCCTCCCCCCTCCCCCCATAGCACAATAAGCAATAGCAAACAGGATACAGTC
TCACCATTGAAGTCAATTTAAATGGAACTATTGATAAAGTGAGTCAACAGCTTGAAGGAGCCGGCATACAGTATAT
CCTATCTAGCCCACCCACGGACACTGGCTCTGCAGGTGGGAGAAGTGAGGGGAGGGGAGGAGTGCCCAGCCCTGGG
GGGATTGTCATTTGAGGTCACAAGCCAGCGTGCCTTTGCAATTTATCTGCCAGCACTGATCACCCTAAACCATGAT
CTTAGGCTGGCCCCAAGAGCCTGCCCCACAAGGGGGAGATCCCAGAGCCTACCGGATAAGGCCCACGGTGCTGAAG
AGCAGGGCACAAGAACTTCAGGAAGAGGAACCGAGGTACGTGAAAAATGCAGCCGAAACTGTTGGCAGTAATGAGG
GGGGCATGTCTCTAACCACCACCAAATCTCTACCCCACATTTCCTCCTCATTCTCAGATCCCTTCACTTAGAGAAT
TGCTGGGACTTAGCGAACAGCAGGGAGCTTCCTGGTGGAGAGTTCTGGGCCCAGAAACTTCTTGCAGGGAAAGCTC
TAGCTGCACACGAAGTTGCCAGCCCTAGGGGATGCCCTGGATTTCTACTGCCAAGTCCCTCAGGGTTGCCTTTAAC
TGTACCCAAACCAGAAGCGGCAGAATTGAGCCTGAGGCTGCTGAGTTTCTTTAGGCAGCAATTTTTTGCAAAGGCG
GCTTCCCTTTTCTCATGGCAGCAGATGGAGTTTGTGCAAGGTCAGTGGGCTGAGGTGCTCTGGTCAAGGCTTTGGG
AACGGTGTCTCCTGACTTATCCTTCCTCAGGCAGGTGGCTCGGGCCTCTGGAGCAGATCCAGGATAGGCCATTCAT
CCCAATCCCTGCTGTGGTCGCAGGGCCCTTGGTGGGAGGCTGGCTGCCCCTCCAGAGGGCGAGCTTGGCGAGGAAC
CCAGTCTGCGGGGTGGCTGAGGCTCATGGAGCTTCTGGGAGCTGCAGATCCCCCCAGCTGGCACTGGCTTCCTTCT
TCTTGTGATGCAGGAGTTGTAAGCCTCCTTTAGGACTGCTGTGGGACTTCGGGCTGTGACCAGAGAGAACCATCCT
CGTGCCGCAAGCCAGACCAGCCACAAGACCTACTCTCTGCCCTGACACAGAGAGCCCCAAGGGGAAGTAGGGAAGG
AGATGTCATCGCTTCAGTCCTAATCCTGTGCTTCAGGCCTTCTTCACAGCTGAACGGCCTCCTTAGATGCTAGAAT
CTGGTCTCTGTTGGGTCCCGGATGCTGAGGAAAGCCTTTCAAACCTTGGGAGGCCCCAGCAGGGCGGCGCCACACA
GGCCACACGCGTCCCAGCGTGGGGGTGAGAGACACCTTGTGAGGGTGGGTTAGAAACCTCTTTACAAGCATTTCAA
GATACATGCGTCCTTTTTTTTTTTTTTTTTTTCTTTTCACTATCATAGTCACTCTGGTGAATCCAAGCATAAACAG
ACAAATCCAACTACAACGCAACAGGGTGCAGATGGGGAGGGCAGGGCAACATCTATGTATATGTTCAGCTGCTCCA
GCAGAACAGACAGCATGGCTTCCAGCTGGGACCGGGGAGAAAACCATTTCGAAGGGGGTGTGTTCCCCTTTTTGGG
ATGTGGAGGGCTGATTCTATGCATGTGGAGCTGAGCAGCGGGCTGGGCTGTCTGGGAGGCTGGCAGCCACAAGCTG
GGGTGCAAGTGGGGGACAGCGGGACTGTGGGCCTGCCCTGGGTGCCTTGCCCGCCCATCCTGGTGCCGTCACCGAC
AACCAGGACACCCAGCCTCCTGCTGCGGGCTCAGCACAGGAAGGGGCCAGGCCTTCTCGGGGGGAAAGGGCTCTCT
CTATGTCAACAAGGCAGAAACACCGAGGGTCACAGCTGAGCAGTGCCCTGGCTCACATCTGTGATGGGAGGAGGAG
GCAGGGAACCGAATCAGGTCGTGAGATTCGTGGTGAGGGACCCAGTTGGATGAGTGGAACTGAGAGTGAGAGGCTG
GGGTCCCACTCTTGTGCCTGGACTTTACCTTCCCTTAATTTCACCCTCAGTATGGAGTAGGTGCCTCCCACAGCCA
ACCAGGGTCCTTACTGAGAAGGGGGGTGGTGAGGCTGGGAATTTGGACATTGTGACGTGATGAGGGGTATAGGCAG
TGACTGGGTTCTCATGGCAGACGACAGCACAGTGGGGCAGACAGGGGTGACTGCAGTGGCCGTGGGAAGGACAGGG
GGCTCGGGACCCGCCTCCCAGACCCCTGCACACTCCAGAGATGCCGGTGGCCCAGGCTTGGAAACGGGTGGACGTC
TCCCAAGAGGCACAAGTCCTTACAAAGAGAACTGGTTAGCCCTAAAGTCCCAGGTCTGCAAAGTGGCCAAAATCAT
GGCTGCAGTTCCAACCTTCAGAACTCAATAAAACAGGGTTTCTGTGGAGCAGAGGGAAGCCCCTCGGCTCAGGCCC
CCTACCCTGCAGGGAGGGAGGAAGAGGCCAGCGCCCTCCGACATCAAGGTCAGTCTTTTCCAAGGAGGTCATCCAC
GGGGTGCCACCCTCCCGCCAGCTTGCCTTCTCTTCTTACCCGCCGCCCCTTCTCCCACAGGCTGCCCTGCAGAGGG
TGGCACATCAACTCGCAGCAGACCCTGGCCACCAAGGACAGGCAGCCGCTCAGTCTGAGACACTGCAGGTGGCGGA
GGCCTTGGCCCTCCCAGTGGCGCGGAGGAGGGCATCTCCTCTCCAGCATGTGGCTTCCTCTCCCACTCCCCCTTCT
CGTCCTTCCTCTCCCCTCTGCCCAGCCCCTGCCTTGGCCTCCCCCATGGCCTCCCGCCCCACCCCCACCCGTCACA
CTCACACAAGGTTGACATCGTCTGCCTGTGGCTCCACGAACACACCAAGTTTCAAATCCTTTGTTGCTGCCGCTGC
CTCTGTGACACCCCCACGACAGGGCCAGAGGCGGTGGGCACCCCCAGTCTCTTGAAATCCCCCCGAAGCAGCTTTC
ACAGCCTCTCCTTCTCCCTCTTCTACATGGAGGGGGAAAAAAAAAGAATCAAAAGGAATTGCCCGAGGAAATGTTG
GGTGTGGCCATGTTTTTGAATGTTTTTTAAAAAATATTTTATTATTAGCCCACCGATCAATTTGGAAAGATGCAAT
TTGCTCTTATTCCCATCACTGATTTTGAAGTCCCGAGCCAAAGCCGAGCGATAAAAGCCGGTTAAGTGATGAACCG
ATTAACCGAACTGCGAGGAGCAGCTGGGGGCAGAGGGCGGGGCCGGGTCATTATTCTTTTTTTTTCCACACTCTCA
CTCTCTCTTCTCTCCACGATTATTGACCGCCCCGGGGGCCTGATCACAAACCCTGCTTGGCCAGGGAGGCAGACAC
CTCGTCGGCTAGCGTGGCGAGCTGGGGCGAGTCTACCATGTCGATGCTGCCGGTGGAGGAGACATTGCTGAGGTGC
CGTGGAGACGTGTCCCCAGACACCACCGGCGACTTGTACACGATTTCCGCCCCGTGGTCTGTCTTGGCTTTGGCGT
TCTCGCGGAAGGTCAGCTTGTGGGTTTCAATCTTTTTATTTCCTCCGCCAGGGACATGGGTGATATTGTCCAGGGA
CCCGATCTTCGACTGCACTCTGTCCTTGAAGTCCAGCTTCTCAGATTTTACTTCCACCTGGCCACCTCCTGGTTTA
TGATGGATGTTGCCTAATGAGCCACACTTGGAGGTCACCTTGCTCAGGTCAACTGGTTTGTAGACTATTTGCACAC
TGCCGCCTCCCGGGACGTGTTTGATATTATCCTTTGAGCCACACTTGGACTGGACGTTGCTAAGATCCAGCTTCTT
ATTAATTATCTGCACCTTCCCGCCTCCCGGCTGGTGCTTCAGGTTCTCGGTGGAGCCGATCTTGGACTTGACGTTC
TTCAGGTCTGGCATGGGCACGGGGGCTGTCTGCAGGCGGCTCTTGGCGGAAGACGGCGACTTAGGTGGAGTACGGA
CCACCGCCACCTTCTTGGGCTCCCGGGCTGGAGGGGTTGGAAGGGACGGGGTGCGGGAGCGGCTGCCGGGAGTGCC
CGGGGAGCCGGGGCTGCTGTAGCCACTGCGATCCCCTGATTTTGGAGGTTCACCAGAGCTGGGTGGTGTCTTTGGG
GCGGGCGGGGTTTTTGCTGGAATCCTGGTGGCGTTGGCTTGGCCCTTCTGGCCTGGAGGGGCCGCTCCCCGGGGTG
TGGCGATCTTCGTTTTCCCATCAGCCCCCTTGGCTTTTTTGTCATCGCTTCCAGTCCCGTCTTTGCTTTTACTGAC
CATGCGAGCTTGGGTCACGTGACCAGCAGCTTCGTCTTCCAGGCTGGGGGTGTCTCCGATGCCTGCTTCCTCAGCT
GTGGTTCCTTCTGGGATCTCCATGTGGGGCTGGGCGGCAGCCTGCTCGCCGGGAGCTCTCTCATCCACTAAGGGCG
CTGTCACATCTTCCGCCGTTGGAGTGCTCTTAGCATCAGAGGTTTCAGAGCCCAGTTCCTCAGATCCATCCTCAGC
GGGGGTCTGCAGGGGAGATTCTTTCAGGCCAGCGTCCGTGTCACCCTCTTGGTCTTGGAGCATGGTGTAGCCCTCT
TGATCTTTCCTGTCCCCCAACCCGTACGTCCCAGCGTGATCTTCCATCACATCGAACTCCTGGCGGGGCTCAGCCA
TCCTGGTTCAAGGCTCGCCTGATAGTCGACAGAGGCGAGGACGGGAGAGGACAGCGGAGGAGGAGAAGGTGGCTGT
GGTGGCGGCGGCAGAAGGTGGGCGGTGGCAGCGGCGCTGCTGTTGGTGCCGGAGCTGGTGGGTGGCGGTGACTGCG
AGGGCGCGCGCCGGGGAAGAGGGCGCGTTCCCGAGGCCGGCAGGCGGCGCAGGCGCGAGCAGCGGGAGCGCGAGCC
TCCCCAGGGGAGGGGGCGGGCAGCCCGGCCTCCGCGGGAGCCTTCTCCTCCGGCCACCAGTGGGCGCGCGCGAGCG
CCCTGCCGCTCGGC
SEQ ID NO: 9
>XM_008768277.2 PREDICTED: Rattus norvegicus microtubule-associated protein
tau (Mapt), transcript variant X7, mRNA
ACCGCCCACCTTCTGCTGTCGCCGCCGCCACAACCACCTTCCCCTCCGCTGTCCTCTTCTGTCCTCGCCTCCTGTC
GATTATCAGGCTTTGAAGCAGCATGGCTGAACCCCGCCAGGAGTTTGACACAATGGAAGACCAGGCCGGAGATTAC
ACTATGCTCCAAGACCAAGAAGGAGACATGGACCATGGCTTAAAAGAGTCTCCCCCACAGCCCCCAGCCGATGATG
GATCAGAAGAACCAGGGTCGGAGACCTCTGATGCTAAGAGCACTCCAACTGCTGAAGACGTGACTGCGCCCCTAGT
GGAAGAGAGAGCTCCCGACAAGCAGGCGACTGCCCAGTCCCACACGGAGATCCCAGAAGGCACCACAGCTGAAGAA
GCAGGCATCGGAGACACCCCGAACATGGAGGACCAAGCTGCTGGGCATGTGACTCAAGCTCGAGTGGCCGGCGTAA
GCAAAGACAGGACAGGAAATGACGAGAAGAAAGCCAAGGGCGCCGATGGCAAAACGGGGGCGAAGATCGCCACACC
TCGGGGAGCAGCCACTCCGGGCCAGAAAGGCACATCCAATGCCACCAGGATCCCAGCCAAGACCACACCCAGCCCA
AAGACTCCTCCAGGATCAGGTGAACCACCAAAATCCGGAGAACGAAGCGGCTACAGCAGCCCCGGCTCGCCCGGAA
CCCCTGGCAGTCGCTCCCGTACCCCATCCCTACCAACGCCGCCCACCCGAGAGCCCAAAAAGGTGGCAGTGGTTCG
CACTCCCCCTAAGTCACCGTCTGCCAGTAAGAGCCGCCTACAGACTGCCCCTGTGCCCATGCCAGACCTAAAGAAC
GTCAGGTCCAAGATTGGCTCCACTGAGAACCTGAAGCACCAGCCGGGAGGCGGCAAGGTGCAGATAATTAATAAGA
AGCTGGATCTTAGCAACGTCCAGTCCAAGTGTGGCTCAAAGGACAATATCAAACACGTCCCGGGCGGAGGCAGTGT
GCAAATAGTCTACAAGCCAGTGGACCTGAGCAAGGTGACCTCCAAGTGTGGTTCCTTAGGGAACATCCATCACAAG
CCAGGAGGTGGCCAGGTAGAAGTAAAATCAGAGAAGCTGGACTTCAAGGATAGAGTCCAGTCGAAGATTGGCTCCT
TGGATAACATCACCCATGTCCCTGGAGGAGGGAATAAGAAGATTGAAACCCACAAGCTGACCTTCAGGGAGAATGC
CAAAGCCAAGACAGACCATGGAGCAGAAATCGTGTACAAGTCACCTGTGGTGTCTGGGGACACATCTCCACGGCAC
CTCAGCAACGTCTCCTCCACGGGCAGCATCGACATGGTGGACTCTCCACAGCTTGCCACGTTAGCCGATGAAGTGT
CCGCCTCTTTGGCCAAGCAGGGTTTGTGATCAGGCCCCTGGGGCCGTCACTGATCATGGAGAGAAGAGAGAGTGAG
AGTGTGGAAAAAAAAAAAAAAAAAAGAATGACCTGGCCCCTCACCCTCTGCCCTCCCCGCTGCTCCTCATAGACAG
GCTGACCAGCTTGTCACCTAACCTGCTTTTGTGGCTCGGGTTTGGCTCGGGACTTCAAAATCAGTGATGGGAAAAA
GTAAATTTCATCTTTCCAAATTGATTTGTGGGCTAGTAATAAAATATTTTTAAGGAAGGAAAAAAAAAAAAACACG
TAAAACCATGGCCAAACAAAACCCAACATTTCCTTGGCAATTGTTATTGACCCCGCCCCCCCCCTCTGAGTTTTAG
AGGGTGAAGGAGGCTTTGGATGGAGGCTGCTTCTGGGGATTGGCTGAGGGACTAGGGCAACTAATTGCCCACAGCC
CCATCTTAGGGGCATCAGGGACAGCGGCAGCAATGAAAGACTTGGGACTTGGTGTGTTTGTGGAGCCGTAGGCAGG
TGATGTTAACTTTGTGTGGGTTTGAGGGAGGACTGTGATAGTGAAGGCTGAGAGATGGGTGGGCTGGGAGTCAGAG
GAGAGAGGTGAGGAAGACAGGTTGGGAGAGGGGACATTGGCTCCTTGCCAAGGAGCTTGGGAAGCACAGGTAGCCC
TGGCTGCCTGCAGCAGTCTTAGCTAGCACAGATGCCTGCCTGAGAAAGCACAGTGGGGTACAGTGGGTGTGTGTGC
CCCTTCTGAAGGGCAGCCCATGGGAGAAGGGGTATTGGGCAGAAGGAAGGTAGGCCAGAAGGTGGCACCTTGTAGA
TTGGTTCTCTGAAGGCTGACCTTGCCATCCCAGGGCACTGGCTCCCACCCTCCAGGGAGGGAGGTCCTGAGCTGAG
GAGCTTCCCTTTGCTCTCACAGGAAAACCTGTGTTACTGAGTTCTGAAGTTTGGAACTACAGCCATGATTTTGGCC
ACCATACAGACCTGGGACTTTAGGGCTAACCAGTTCTTTGTAAGGACTTGTGCCTCTTGCGGGAACATCTGCCTGT
TCTCAAGCCTGGTCCTCTGGCACTTCTGCAGTGTGAGGGATGGGGGTGGTAATTCTGGGATGTGGGTCCCAGGCCT
CCCATCCTCGCACAGCCACTGTATCCCCTCTACCTGTCCTATCATGCCCACGTCTGCCATGAGAGCCAGTCACTGC
CGTCCGTACATCACGTCTCACCGTCCTGAGTGCCCAGCCTCCCCAAGCCCCATCCCTGGCCCCTGGGTAGTTATGG
CCAATATCTGCTCTACACTAGGGGTTGGAGTCCAGGGAAGGCAAAGATTTGGGCCTTGGTCTCTAGTCCTACGTTG
CACGAATCCAACCAGTGTGCCTCCCACAAGGAACCTTACAACCTTGTTTGGTTTGCTCCATCATTTCCCATCGTGG
ATGGGAGTCCGTGTGTGCCTGGAGATTACCCTGGACACCTCTGCTTTTTTTTTTTTACTTTAGCGGTTGCCTCCTA
GGCCTGACTCCTTCCCATGTTGAACTGGAGGCAGCCACGTTAGGTGTCAATGTCCTGGCATCAGTATGAACAGTCA
GTAGTCCCAGGGCAGGGCCACACTTCTCCCATCTTCTGCTTCCACCCCAGCTTGTGATTGCTAGCCTCCCAGAGCT
CAGCCGCCATTAAGTCCCCATGCACGTAATCAGCCCTTCATACCCCAATTTGGGGAACATACCCCTTGATTGAAAT
GTTTTCCCTCCAGTCCTATGGAAGCGGTGCTGCCTGCCCTGCTGGAGCAGCCAGCCATCTCCAGAGACGCAGCCCT
TTCTCTCCTGTCCGCACCCTGTTGCGCTGTAGTCGGATTCGTCTGTTTGTCTGGGTTCACCAGAGTGACTATGATA
GTGAAAAGAAAAAGAAAAAGAAAAAAGAAAAAAGAAAAAAAAAAAAGGACGCATGTTATCTTGAAATATTTGTCAA
AAGGTTGTAGCCCACCGCAGGGATTGGAGGGCCTGGATATTCCTTGTCTTCTTCGTGACTTAGGTCCAGGCCGGTG
CAGTGCTACCCTGCTGGGACATCCCATGTTTTGAAGGGTTTCTTCTTCATCTGGGACCCTGCAGACACTGGATTGT
GACATTGGAGGTCTATGACATTGGCCAAGGCCTGAAGCACAGGACCCGTTAGAGGCAGCAGGCTCCGACTGTCAGG
GAGAGCTTGTGGCTGGCCTGTTTCTCTGAGTGAAGATGGTCCTCTCTAATCACAACTTCAAGTCCCACAGCAGCCC
TGGCAGACATCTAAGAACTCCTGCATCACAAGAGAAAAGGACACTAGTACCAGCAGGGAGAGCTGTGGCCCTAGAA
ATTCCATGACTCTCCACTACATATCCGTGGGTCCTTTCCAAGCCTTGGCCTCGTCACCAAGGGCTTGGGATGGACT
GCCCCACTGATGAAAGGGACATCTTTGGAGACCCCCTTGGTTTCCAAGGCGTCAGCCCCCTGACCTTGCATGACCT
CCTACAGCTGTAAGGATGAGGCCTTTAAAGATTAGGAACCTCAGGCCCAGGTCGGCCACTTTGGGCTTGGGTACAG
TTAGGGACGATGCGGTAGAAGGAGGTGGCCAACCTTTCCCATATAAGAGTTCTGTGTGCCCAGAGCTACCCTATTG
TGAGCTCCCCACTGCTGATGGACTTTAGCTGTCCTTAGAAGTGAAGAGTCCAACGGAGGAAAAGGAAGTGTGGTTT
GATGGTCTGTGGTCCCTTCATCATGGTTACCTGTTGTGGTTTTCTCTCGTATACCCATTTACCCATCCTGCAGTTC
CTGTCCTTGAATAGGGGTGGGGGTACTCTGCCATATCTCTTGTAGGGCAGTCAGCCCCCAAGTCATAGTTTGGAGT
GATCTGGTCAGTGCTAATAGGCAGTTTACAAAGGAATTCTGGCTTGTTACTTCAGTGAGGACAATCCCCCAAGGGC
CCTGGCACCTGTCCTGTCTTTCCATGGCTCTCCACTGCAGAGCCAATGTCTTTGGGTGGGCTAGATAGGGTGTACA
ATTTGCCTGGTTCCTCCAAGCTCTTAATCCACTTTATCAATAGTTCCATTTAAATTGACTTCAATGATAAGAGTGT
ATCCCATTTGAGATTGCTTGTGTTGTGGGGTAAAGGGGGGAGGAGGAACATGTTAAGATAATTGACATGGGCAAGG
GGAAGTCTTGAAGTGTAGCAGTTAAACCATCTTGTAGCCCCATTCATGATGTTGACCACTTGCTAGAGAGAAGAGG
TGCCATAAGGCTAGAACCTAGAGGCTTGGCTGTCCCACCAACAGGCAGGCTTTTGCAAGGCAGAGGCAGCCAGCTA
GGTCCCTGACTTCCCAGCCAGGTGCAGCTCTAAGAACTGCTCTTGCCTGCTGCCTTCTTGTGGTGTCCAGAGCCCA
CAGCCAATGCCTCCTCAAAACCCTGGCTTCCTTCCTTCTAATCCACTGGCACATCAGCATCACCTCCGGATTGACT
TCAGATCCACAGCCTACACTACTAGCAGTGGGTAAGACCACTTCCTTTGTCCTTGTCTGTTCTCCAGAAAAGTGGG
CATGGAGGCGGTGTTAATAACTATAGGTCTGTGGCTTTATGAGCCTTCAAACTTCTCTCTAGCTTCTGAAAGGGTT
ACTTTTGGGCAGTATTGCAGTCTCACCCTCCCGATGGGCTGTAGCCTGTGCAGTTGCTGTACTGGGCATGATCTCC
AGTGCTTGCAAGTCCCATGATTTCTTTGGTGATTTTGAGGGTGGGGGGAGGGACATGAATCATCTTAGCTTAGCTT
CCTGTCTGTGAATGTCCATATAGTGTACTGTGTTTTAACAAACGATTTACACTGACTGTTGCTGTACAAGTGAATT
TGGAAATAAAGTTATTACTCTGATTAAA
SEQ ID NO: 10
>Reverse Complement of SEQ ID NO: 9
TTTAATCAGAGTAATAACTTTATTTCCAAATTCACTTGTACAGCAACAGTCAGTGTAAATCGTTTGTTAAAACACA
GTACACTATATGGACATTCACAGACAGGAAGCTAAGCTAAGATGATTCATGTCCCTCCCCCCACCCTCAAAATCAC
CAAAGAAATCATGGGACTTGCAAGCACTGGAGATCATGCCCAGTACAGCAACTGCACAGGCTACAGCCCATCGGGA
GGGTGAGACTGCAATACTGCCCAAAAGTAACCCTTTCAGAAGCTAGAGAGAAGTTTGAAGGCTCATAAAGCCACAG
ACCTATAGTTATTAACACCGCCTCCATGCCCACTTTTCTGGAGAACAGACAAGGACAAAGGAAGTGGTCTTACCCA
CTGCTAGTAGTGTAGGCTGTGGATCTGAAGTCAATCCGGAGGTGATGCTGATGTGCCAGTGGATTAGAAGGAAGGA
AGCCAGGGTTTTGAGGAGGCATTGGCTGTGGGCTCTGGACACCACAAGAAGGCAGCAGGCAAGAGCAGTTCTTAGA
GCTGCACCTGGCTGGGAAGTCAGGGACCTAGCTGGCTGCCTCTGCCTTGCAAAAGCCTGCCTGTTGGTGGGACAGC
CAAGCCTCTAGGTTCTAGCCTTATGGCACCTCTTCTCTCTAGCAAGTGGTCAACATCATGAATGGGGCTACAAGAT
GGTTTAACTGCTACACTTCAAGACTTCCCCTTGCCCATGTCAATTATCTTAACATGTTCCTCCTCCCCCCTTTACC
CCACAACACAAGCAATCTCAAATGGGATACACTCTTATCATTGAAGTCAATTTAAATGGAACTATTGATAAAGTGG
ATTAAGAGCTTGGAGGAACCAGGCAAATTGTACACCCTATCTAGCCCACCCAAAGACATTGGCTCTGCAGTGGAGA
GCCATGGAAAGACAGGACAGGTGCCAGGGCCCTTGGGGGATTGTCCTCACTGAAGTAACAAGCCAGAATTCCTTTG
TAAACTGCCTATTAGCACTGACCAGATCACTCCAAACTATGACTTGGGGGCTGACTGCCCTACAAGAGATATGGCA
GAGTACCCCCACCCCTATTCAAGGACAGGAACTGCAGGATGGGTAAATGGGTATACGAGAGAAAACCACAACAGGT
AACCATGATGAAGGGACCACAGACCATCAAACCACACTTCCTTTTCCTCCGTTGGACTCTTCACTTCTAAGGACAG
CTAAAGTCCATCAGCAGTGGGGAGCTCACAATAGGGTAGCTCTGGGCACACAGAACTCTTATATGGGAAAGGTTGG
CCACCTCCTTCTACCGCATCGTCCCTAACTGTACCCAAGCCCAAAGTGGCCGACCTGGGCCTGAGGTTCCTAATCT
TTAAAGGCCTCATCCTTACAGCTGTAGGAGGTCATGCAAGGTCAGGGGGCTGACGCCTTGGAAACCAAGGGGGTCT
CCAAAGATGTCCCTTTCATCAGTGGGGCAGTCCATCCCAAGCCCTTGGTGACGAGGCCAAGGCTTGGAAAGGACCC
ACGGATATGTAGTGGAGAGTCATGGAATTTCTAGGGCCACAGCTCTCCCTGCTGGTACTAGTGTCCTTTTCTCTTG
TGATGCAGGAGTTCTTAGATGTCTGCCAGGGCTGCTGTGGGACTTGAAGTTGTGATTAGAGAGGACCATCTTCACT
CAGAGAAACAGGCCAGCCACAAGCTCTCCCTGACAGTCGGAGCCTGCTGCCTCTAACGGGTCCTGTGCTTCAGGCC
TTGGCCAATGTCATAGACCTCCAATGTCACAATCCAGTGTCTGCAGGGTCCCAGATGAAGAAGAAACCCTTCAAAA
CATGGGATGTCCCAGCAGGGTAGCACTGCACCGGCCTGGACCTAAGTCACGAAGAAGACAAGGAATATCCAGGCCC
TCCAATCCCTGCGGTGGGCTACAACCTTTTGACAAATATTTCAAGATAACATGCGTCCTTTTTTTTTTTTCTTTTT
TCTTTTTTCTTTTTCTTTTTCTTTTCACTATCATAGTCACTCTGGTGAACCCAGACAAACAGACGAATCCGACTAC
AGCGCAACAGGGTGCGGACAGGAGAGAAAGGGCTGCGTCTCTGGAGATGGCTGGCTGCTCCAGCAGGGCAGGCAGC
ACCGCTTCCATAGGACTGGAGGGAAAACATTTCAATCAAGGGGTATGTTCCCCAAATTGGGGTATGAAGGGCTGAT
TACGTGCATGGGGACTTAATGGCGGCTGAGCTCTGGGAGGCTAGCAATCACAAGCTGGGGTGGAAGCAGAAGATGG
GAGAAGTGTGGCCCTGCCCTGGGACTACTGACTGTTCATACTGATGCCAGGACATTGACACCTAACGTGGCTGCCT
CCAGTTCAACATGGGAAGGAGTCAGGCCTAGGAGGCAACCGCTAAAGTAAAAAAAAAAAAGCAGAGGTGTCCAGGG
TAATCTCCAGGCACACACGGACTCCCATCCACGATGGGAAATGATGGAGCAAACCAAACAAGGTTGTAAGGTTCCT
TGTGGGAGGCACACTGGTTGGATTCGTGCAACGTAGGACTAGAGACCAAGGCCCAAATCTTTGCCTTCCCTGGACT
CCAACCCCTAGTGTAGAGCAGATATTGGCCATAACTACCCAGGGGCCAGGGATGGGGCTTGGGGAGGCTGGGCACT
CAGGACGGTGAGACGTGATGTACGGACGGCAGTGACTGGCTCTCATGGCAGACGTGGGCATGATAGGACAGGTAGA
GGGGATACAGTGGCTGTGCGAGGATGGGAGGCCTGGGACCCACATCCCAGAATTACCACCCCCATCCCTCACACTG
CAGAAGTGCCAGAGGACCAGGCTTGAGAACAGGCAGATGTTCCCGCAAGAGGCACAAGTCCTTACAAAGAACTGGT
TAGCCCTAAAGTCCCAGGTCTGTATGGTGGCCAAAATCATGGCTGTAGTTCCAAACTTCAGAACTCAGTAACACAG
GTTTTCCTGTGAGAGCAAAGGGAAGCTCCTCAGCTCAGGACCTCCCTCCCTGGAGGGTGGGAGCCAGTGCCCTGGG
ATGGCAAGGTCAGCCTTCAGAGAACCAATCTACAAGGTGCCACCTTCTGGCCTACCTTCCTTCTGCCCAATACCCC
TTCTCCCATGGGCTGCCCTTCAGAAGGGGCACACACACCCACTGTACCCCACTGTGCTTTCTCAGGCAGGCATCTG
TGCTAGCTAAGACTGCTGCAGGCAGCCAGGGCTACCTGTGCTTCCCAAGCTCCTTGGCAAGGAGCCAATGTCCCCT
CTCCCAACCTGTCTTCCTCACCTCTCTCCTCTGACTCCCAGCCCACCCATCTCTCAGCCTTCACTATCACAGTCCT
CCCTCAAACCCACACAAAGTTAACATCACCTGCCTACGGCTCCACAAACACACCAAGTCCCAAGTCTTTCATTGCT
GCCGCTGTCCCTGATGCCCCTAAGATGGGGCTGTGGGCAATTAGTTGCCCTAGTCCCTCAGCCAATCCCCAGAAGC
AGCCTCCATCCAAAGCCTCCTTCACCCTCTAAAACTCAGAGGGGGGGGGCGGGGTCAATAACAATTGCCAAGGAAA
TGTTGGGTTTTGTTTGGCCATGGTTTTACGTGTTTTTTTTTTTTTCCTTCCTTAAAAATATTTTATTACTAGCCCA
CAAATCAATTTGGAAAGATGAAATTTACTTTTTCCCATCACTGATTTTGAAGTCCCGAGCCAAACCCGAGCCACAA
AAGCAGGTTAGGTGACAAGCTGGTCAGCCTGTCTATGAGGAGCAGCGGGGAGGGCAGAGGGTGAGGGGCCAGGTCA
TTCTTTTTTTTTTTTTTTTTTCCACACTCTCACTCTCTCTTCTCTCCATGATCAGTGACGGCCCCAGGGGCCTGAT
CACAAACCCTGCTTGGCCAAAGAGGCGGACACTTCATCGGCTAACGTGGCAAGCTGTGGAGAGTCCACCATGTCGA
TGCTGCCCGTGGAGGAGACGTTGCTGAGGTGCCGTGGAGATGTGTCCCCAGACACCACAGGTGACTTGTACACGAT
TTCTGCTCCATGGTCTGTCTTGGCTTTGGCATTCTCCCTGAAGGTCAGCTTGTGGGTTTCAATCTTCTTATTCCCT
CCTCCAGGGACATGGGTGATGTTATCCAAGGAGCCAATCTTCGACTGGACTCTATCCTTGAAGTCCAGCTTCTCTG
ATTTTACTTCTACCTGGCCACCTCCTGGCTTGTGATGGATGTTCCCTAAGGAACCACACTTGGAGGTCACCTTGCT
CAGGTCCACTGGCTTGTAGACTATTTGCACACTGCCTCCGCCCGGGACGTGTTTGATATTGTCCTTTGAGCCACAC
TTGGACTGGACGTTGCTAAGATCCAGCTTCTTATTAATTATCTGCACCTTGCCGCCTCCCGGCTGGTGCTTCAGGT
TCTCAGTGGAGCCAATCTTGGACCTGACGTTCTTTAGGTCTGGCATGGGCACAGGGGCAGTCTGTAGGCGGCTCTT
ACTGGCAGACGGTGACTTAGGGGGAGTGCGAACCACTGCCACCTTTTTGGGCTCTCGGGTGGGCGGCGTTGGTAGG
GATGGGGTACGGGAGCGACTGCCAGGGGTTCCGGGCGAGCCGGGGCTGCTGTAGCCGCTTCGTTCTCCGGATTTTG
GTGGTTCACCTGATCCTGGAGGAGTCTTTGGGCTGGGTGTGGTCTTGGCTGGGATCCTGGTGGCATTGGATGTGCC
TTTCTGGCCCGGAGTGGCTGCTCCCCGAGGTGTGGCGATCTTCGCCCCCGTTTTGCCATCGGCGCCCTTGGCTTTC
TTCTCGTCATTTCCTGTCCTGTCTTTGCTTACGCCGGCCACTCGAGCTTGAGTCACATGCCCAGCAGCTTGGTCCT
CCATGTTCGGGGTGTCTCCGATGCCTGCTTCTTCAGCTGTGGTGCCTTCTGGGATCTCCGTGTGGGACTGGGCAGT
CGCCTGCTTGTCGGGAGCTCTCTCTTCCACTAGGGGCGCAGTCACGTCTTCAGCAGTTGGAGTGCTCTTAGCATCA
GAGGTCTCCGACCCTGGTTCTTCTGATCCATCATCGGCTGGGGGCTGTGGGGGAGACTCTTTTAAGCCATGGTCCA
TGTCTCCTTCTTGGTCTTGGAGCATAGTGTAATCTCCGGCCTGGTCTTCCATTGTGTCAAACTCCTGGCGGGGTTC
AGCCATGCTGCTTCAAAGCCTGATAATCGACAGGAGGCGAGGACAGAAGAGGACAGCGGAGGGGAAGGTGGTTGTG
GCGGCGGCGACAGCAGAAGGTGGGCGGT
SEQ ID NO: 11
>XM_005624183.3 PREDICTED: Canis lupus familiaris microtubule associated
protein tau (MAPT), transcript variant X23, mRNA
CGCGCTCGCGCTCTCAGCCACCCACCAGCTCCCGCACCAGCAGCAGCAGCGCCGCCGCCGCCGCCGCCGCCGCCGC
CGCCCACCTTCTGCTGCCGCCACCACAGCCACTTTCTCCTCTTTCCTCTCCTGTCCTCGCCCTCTGTCGACTATCA
GGTGGGCCTTGACCTAGGATGGCTGAGCCCCGCCAGGAGTTCACTGTGATGGAAGATCATGCTGGGACATACGGGA
AAGATCTCCCCTCTCAGGGGGGCTACACCCTGCTGCAAGACCATGAGGGGGACGTGGATCACGGCCTGAAAGCTGA
AGAAGCAGGCATTGGAGACACCCCCAACCTGGAAGACCAAGCTGCTGGACATGTGACTCAAGCTCGCATGGTCAGT
AAAGGCAAAGATGGGACTGGAACCGATGACAAAAAAGCCAAGGGGGCTGATGGTAAAACTGGAACGAAGATCGCCA
CACCCCGGGGAGCGACCCCTTCAGGCCAGAAAGGCCAGGCCAATGCCACCAGGATTCCAGCGAAAACCACGCCCTC
CCCCAAGACCCCACCGGGCGGTGAATCTGGAAAATCTGGGGATCGCAGTGGCTACAGCAGCCCCGGCTCCCCAGGC
ACTCCTGGCAGCCGCTCCCGCACCCCGTCCCTGCCAACCCCACCCACCCGGGAGCCCAAGAAGGTGGCGGTGGTCC
GCACCCCACCCAAGTCGCCGTCTGCAGCCAAGAGTCGCCTGCAGACCGCCCCTGTGCCCATGCCAGACCTAAAGAA
CGTCAGATCCAAGATCGGCTCCACTGAAAACCTGAAGCACCAGCCAGGAGGTGGGAAGGTGCAAATAGTGTACAAA
CCAGTGGATCTGAGCAAGGTGACCTCCAAGTGCGGCTCATTAGGCAACATCCATCATAAGCCAGGAGGCGGTCAGG
TGGAAGTCAAATCTGAGAAGCTGGACTTCAAGGACAGAGTCCAGTCGAAGATCGGGTCCCTGGACAACATCACCCA
CGTCCCTGGCGGAGGGAATAAAAAGATCGAAACCCACAAGCTGACCTTCCGTGAGAACGCCAAAGCCAAGACCGAC
CACGGGGCGGAGATCGTGTACAAGTCGCCCGTGGTGTCCGGGGACACGTCTCCGCGGCACCTGAGCAACGTGTCCT
CCACGGGCAGCATCGACATGGTCGACTCGCCCCAGCTCGCCACGCTAGCCGACGAAGTGTCCGCCTCCCTGGCCAA
GCAGGGTTTGTGATCAGGCCCCCGGGGCGGTCAATGATCGTGGAGAGAAGAGAGTGTGGAAAAAAAAAGAATAATG
ATCTGGCCCTTCTCGCCCTCTGCCCTCCCCCAGCTGCTCCTCACAGACCGGTTAATCGGTTAATCACTTAACCTGC
TTTTGTCGCTCGGCTCTGGCTCGGGACTTCAAAATCAGTGACGGGAAAAAGCAAATTTCATCTTTCCAAATTGATG
GGTGGGCTAATAATAATAAAATATTTTTAAAACCATTTAAAAA
SEQ ID NO: 12
>Reverse Complement of SEQ ID NO: 11
TTTTTAAATGGTTTTAAAAATATTTTATTATTATTAGCCCACCCATCAATTTGGAAAGATGAAATTTGCTTTTTCC
CGTCACTGATTTTGAAGTCCCGAGCCAGAGCCGAGCGACAAAAGCAGGTTAAGTGATTAACCGATTAACCGGTCTG
TGAGGAGCAGCTGGGGGAGGGCAGAGGGCGAGAAGGGCCAGATCATTATTCTTTTTTTTTCCACACTCTCTTCTCT
CCACGATCATTGACCGCCCCGGGGGCCTGATCACAAACCCTGCTTGGCCAGGGAGGCGGACACTTCGTCGGCTAGC
GTGGCGAGCTGGGGCGAGTCGACCATGTCGATGCTGCCCGTGGAGGACACGTTGCTCAGGTGCCGCGGAGACGTGT
CCCCGGACACCACGGGCGACTTGTACACGATCTCCGCCCCGTGGTCGGTCTTGGCTTTGGCGTTCTCACGGAAGGT
CAGCTTGTGGGTTTCGATCTTTTTATTCCCTCCGCCAGGGACGTGGGTGATGTTGTCCAGGGACCCGATCTTCGAC
TGGACTCTGTCCTTGAAGTCCAGCTTCTCAGATTTGACTTCCACCTGACCGCCTCCTGGCTTATGATGGATGTTGC
CTAATGAGCCGCACTTGGAGGTCACCTTGCTCAGATCCACTGGTTTGTACACTATTTGCACCTTCCCACCTCCTGG
CTGGTGCTTCAGGTTTTCAGTGGAGCCGATCTTGGATCTGACGTTCTTTAGGTCTGGCATGGGCACAGGGGCGGTC
TGCAGGCGACTCTTGGCTGCAGACGGCGACTTGGGTGGGGTGCGGACCACCGCCACCTTCTTGGGCTCCCGGGTGG
GTGGGGTTGGCAGGGACGGGGTGCGGGAGCGGCTGCCAGGAGTGCCTGGGGAGCCGGGGCTGCTGTAGCCACTGCG
ATCCCCAGATTTTCCAGATTCACCGCCCGGTGGGGTCTTGGGGGAGGGCGTGGTTTTCGCTGGAATCCTGGTGGCA
TTGGCCTGGCCTTTCTGGCCTGAAGGGGTCGCTCCCCGGGGTGTGGCGATCTTCGTTCCAGTTTTACCATCAGCCC
CCTTGGCTTTTTTGTCATCGGTTCCAGTCCCATCTTTGCCTTTACTGACCATGCGAGCTTGAGTCACATGTCCAGC
AGCTTGGTCTTCCAGGTTGGGGGTGTCTCCAATGCCTGCTTCTTCAGCTTTCAGGCCGTGATCCACGTCCCCCTCA
TGGTCTTGCAGCAGGGTGTAGCCCCCCTGAGAGGGGAGATCTTTCCCGTATGTCCCAGCATGATCTTCCATCACAG
TGAACTCCTGGCGGGGCTCAGCCATCCTAGGTCAAGGCCCACCTGATAGTCGACAGAGGGCGAGGACAGGAGAGGA
AAGAGGAGAAAGTGGCTGTGGTGGCGGCAGCAGAAGGTGGGCGGCGGCGGCGGCGGCGGCGGCGGCGGCGCTGCTG
CTGCTGGTGCGGGAGCTGGTGGGTGGCTGAGAGCGCGAGCGCG
SEQ ID NO: 13
> MAPT (NM_005910) exon 10
GTGCAGATAATTAATAAGAAGCTGGATCTTAGCAACGTCCAGTCCAAGTGTGGCTCAAAGGATAATATCAAACACG
TCCCGGGAGGCGGCAGT

We claim:

1. A double stranded ribonucleic acid (dsRNA) agent for inhibiting expression of 4R-tau, wherein the dsRNA agent comprises a sense strand and an antisense strand forming a double stranded region,
wherein the sense strand comprises at least 15 contiguous nucleotides differing by no more than 3 nucleotides from the nucleotide sequence of nucleotides 1009-1053 of SEQ ID NO: 3, and the antisense strand comprises at least 15 contiguous nucleotides differing by no more than 3 nucleotides from the nucleotide sequence of nucleotides 1007-1053 of SEQ ID NO: 4.

2. The dsRNA agent of claim 1, wherein the sense strand comprises at least 15 contiguous nucleotides of nucleotides 1009-1053 of SEQ ID NO: 3, and the antisense strand comprises at least 15 contiguous nucleotides of nucleotides 1007-1053 of SEQ ID NO: 4.

3. A double stranded ribonucleic acid (dsRNA) agent for inhibiting expression of 4R-tau, wherein the dsRNA agent comprises a sense strand and an antisense strand forming a double stranded region,
wherein the antisense strand comprises a region of complementarity to an mRNA encoding 4R-tau, and wherein the region of complementarity comprises at least 15 contiguous nucleotides differing by no more than 3 nucleotides from the nucleotide sequence of nucleotides 1007-1053 of SEQ ID NO: 4.

4. The dsRNA agent of claim 3, wherein the region of complementarity comprises at least 15 contiguous nucleotides of nucleotides 1007-1053 of SEQ ID NO: 4.

5. The dsRNA agent of claim 4, wherein the region of complementarity resides fully within nucleotides 1007-1053 of SEQ ID NO: 4.

6. A double stranded ribonucleic acid (dsRNA) agent for inhibiting expression of 4R-tau, wherein the dsRNA agent comprises a sense strand and an antisense strand forming a double stranded region,
wherein the antisense strand comprises a region of complementarity to an mRNA encoding 4R-tau, and wherein the region of complementarity comprises at least 15 contiguous nucleotides differing by no more than 3 nucleotides from any one of the antisense nucleotide sequences in Table 7 or 8.

7. The dsRNA agent of claim 6, wherein the nucleotide sequence of the sense and antisense strand comprise any the sense and antisense strand nucleotide sequences of any one of the duplexes in Table 7 or 8.

8. The dsRNA agent of any one of claims 1-7, wherein the sense strand comprises at least 15 contiguous nucleotides differing by no more than three nucleotides from any one of the nucleotide sequence of nucleotides 1009-1029, 1016-1036, 1018-1038, 1020-1040, 1021-1041, 1022-1042, 1024-1044, 1027-1047, 1028-1048, 1029-1049, 1030-1050, 1032-1052, 1033-1053, 1014-1048, and 1022-1048 of SEQ ID NO: 3, and the antisense strand comprises at least 15 contiguous nucleotides from the corresponding nucleotide sequence of SEQ ID NO: 4.

9. The dsRNA agent of any one of claims 1-7, wherein the antisense strand comprises at least 15 contiguous nucleotides differing by no more than three nucleotides from any one of the antisense strand nucleotide sequences of a duplex selected from the group consisting of (a) AD-2204877, AD-1597146, AD-2204883, AD-2204885, AD-2204886, AD-1597147, AD-1597148, AD-2126092, AD-2126093, AD-2204890, AD-2204891, AD-1597149, and AD-2204893; or (b) AD-1423276, AD-1423283, AD-1423285, AD-1423287, AD-1423288, AD-1423289, AD-1423291, AD-1423294, AD-1423295, AD-1423296, AD-1423297, AD-1423299, and AD-1423300.

10. The dsRNA agent of claim 9, wherein the antisense strand comprises at least 15 contiguous nucleotides differing by no more than three nucleotides from any one of the antisense strand nucleotide sequences of a duplex selected from the group consisting of (a) AD-1597146, AD-1597148, AD-2126092, and AD-2126093; or (b) AD-1423283, AD-1423291, AD-1423294, and AD-1423295.

11. The dsRNA agent of claim 9, wherein the antisense strand comprises at least 15 contiguous nucleotides differing by no more than three nucleotides from any one of the antisense strand nucleotide sequences of a duplex selected from the group consisting of (a) AD-1597146, AD-1597148, and AD-2126092; or (b) AD-1423283, AD-1423291, and AD-1423294.

12. The dsRNA agent of any one of claims 1-7, wherein the dsRNA agent is able to decrease 4R-tau isoform mRNA expression by at least about 50%, 55%, 60%, 65%, 70%, or 75%, while decreasing 3R-tau isoform mRNA expression by no more than about 40%, 35%, 30%, 25%, 20%, 15%, 10%, or 5% in a cell expressing both 3R-tau and 4R-tau isoforms.

13. The dsRNA agent of any one of claims 1-7, wherein the dsRNA agent is able to decrease 4R-tau isoform mRNA expression by at least about 70%, while decreasing 3R-tau isoform mRNA expression by no more than about 30% in a cell expressing both 3R-tau and 4R-tau isoforms.

14. The dsRNA agent of any one of claims 1-13, wherein the sense strand, the antisense strand, or both the sense strand and the antisense strand is conjugated to one or more lipophilic moieties.

15. The dsRNA agent of claim 14, wherein the lipophilic moiety is conjugated to one or more internal positions in the double stranded region of the dsRNA agent.

16. The dsRNA agent of claim 14 or 15, wherein the lipophilic moiety is conjugated via a linker or carrier.

17. The dsRNA agent of any one of claims 14-16, wherein lipophilicity of the lipophilic moiety, measured by logK_{ow}, exceeds 0.

18. The dsRNA agent of any one of claims 1-17, wherein the hydrophobicity of the double-stranded RNA agent, measured by the unbound fraction in a plasma protein binding assay of the double-stranded RNA agent, exceeds 0.2.

19. The dsRNA agent of claim 18, wherein the plasma protein binding assay is an electrophoretic mobility shift assay using human serum albumin protein.

20. The dsRNA agent of any one of claims 1-19, wherein the dsRNA agent comprises at least one modified nucleotide.

21. The dsRNA agent of claim 20, wherein no more than five of the sense strand nucleotides and no more than five of the nucleotides of the antisense strand are unmodified nucleotides.

22. The dsRNA agent of claim 20, wherein all of the nucleotides of the sense strand and all of the nucleotides of the antisense strand are modified nucleotides.

23. The dsRNA agent of any one of claims 20-22, wherein at least one of the modified nucleotides is selected from the group consisting of a deoxy-nucleotide, a 3′-terminal deoxythymidine (dT) nucleotide, a 2′-O-methyl modified nucleotide, a 2′-deoxy-2′-fluoro modified nucleotide, a 2′-deoxy-modified nucleotide, a locked nucleotide, an unlocked nucleotide, a 2′-5′ linked nucleotide (3′-RNA), a conformationally restricted nucleotide, a constrained ethyl nucleotide, an abasic nucleotide, a 2′-amino-modified nucleotide, a 2′-O-allyl-modified nucleotide, 2′-C-alkyl-modified nucleotide, 2′-hydroxly-modified nucleotide, a 2′-methoxyethyl modified nucleotide, a 2′-O-alkyl-modified nucleotide, a morpholino nucleotide, a phosphoramidate, a non-natural base comprising nucleotide, a tetrahydropyran modified nucleotide, a 1,5-anhydrohexitol modified nucleotide, a cyclohexenyl modified nucleotide, a nucleotide comprising a 5′-phosphorothioate group, a nucleotide comprising a 5′-methylphosphonate group, a nucleotide comprising a 5′ phosphate or 5′ phosphate mimic, a nucleotide comprising vinyl phosphonate, a nucleotide comprising 5′-vinyl phosphonate, a glycol nucleic acid (GNA), a glycol nucleic acid S-Isomer (S-GNA), a nucleotide comprising 2-hydroxymethyl-tetrahydrofuran-5-phosphate, a nucleotide comprising 2′-deoxythymidine-3′phosphate, a nucleotide comprising 2′-deoxyguanosine-3′-phosphate, and a terminal nucleotide linked to a cholesteryl derivative and a dodecanoic acid bisdecylamide group; and combinations thereof.

24. The dsRNA agent of claim 23, wherein the modified nucleotide is selected from the group consisting of a 2′-deoxy-2′-fluoro modified nucleotide, a 2′-deoxy-modified nucleotide, 3′-terminal deoxythymidine nucleotides (dT), a locked nucleotide, an abasic nucleotide, a 2′-amino-modified nucleotide, a 2′-alkyl-modified nucleotide, a morpholino nucleotide, a phosphoramidate, and a non-natural base comprising nucleotide.

25. The dsRNA agent of claim 23, wherein the modified nucleotide comprises a short sequence of 3′-terminal deoxythymidine nucleotides (dT).

26. The dsRNA agent of claim 23, wherein the modifications on the nucleotides are selected from 2′-O-methyl, 2′-deoxy, GNA, and 2′-deoxy-2′-fluoro modifications.

27. The dsRNA agent of any one of claims 1-26, further comprising at least one phosphorothioate internucleotide linkage.

28. The dsRNA agent of claim 27, wherein the dsRNA agent comprises 6-8 phosphorothioate internucleotide linkages.

29. The dsRNA agent of any one of claims 1-28, wherein each strand is no more than 30 nucleotides in length.

30. The dsRNA agent of any one of claims 1-29, wherein at least one strand comprises a 3′ overhang of at least 1 nucleotide.

31. The dsRNA agent of any one of claims 1-30, wherein at least one strand comprises a 3′ overhang of at least 2 nucleotides.

32. The dsRNA agent of any one of claims 1-31, wherein the double stranded region is 15-30 nucleotide pairs in length.

33. The dsRNA agent of claim 32, wherein the double stranded region is 17-23 nucleotide pairs in length.

34. The dsRNA agent of claim 32, wherein the double stranded region is 17-25 nucleotide pairs in length.

35. The dsRNA agent of claim 32, wherein the double stranded region is 23-27 nucleotide pairs in length.

36. The dsRNA agent of claim 32, wherein the double stranded region is 19-21 nucleotide pairs in length.

37. The dsRNA agent of claim 32, wherein the double stranded region is 21-23 nucleotide pairs in length.

38. The dsRNA agent of any one of claims 1-37, wherein each strand has 19-30 nucleotides.

39. The dsRNA agent of any one of claims 1-37, wherein each strand has 19-23 nucleotides.

40. The dsRNA agent of any one of claims 1-37, wherein each strand has 21-23 nucleotides.

41. The dsRNA agent of any one of claims 15-40, wherein one or more lipophilic moieties are conjugated to one or more internal positions on at least one strand.

42. The dsRNA agent of claim 41, wherein the one or more lipophilic moieties are conjugated to one or more internal positions on at least one strand via a linker or carrier.

43. The dsRNA agent of claim 42, wherein the internal positions include all positions except the terminal two positions from each end of the at least one strand.

44. The dsRNA agent of claim 42, wherein the internal positions include all positions except the terminal three positions from each end of the at least one strand.

45. The dsRNA agent of claim 42-44, wherein the internal positions exclude a cleavage site region of the sense strand.

46. The dsRNA agent of claim 45, wherein the internal positions include all positions except positions 9-12, counting from the 5′-end of the sense strand.

47. The dsRNA agent of claim 45, wherein the internal positions include all positions except positions 11-13, counting from the 3′-end of the sense strand.

48. The dsRNA agent of claim 42-44, wherein the internal positions exclude a cleavage site region of the antisense strand.

49. The dsRNA agent of claim 48, wherein the internal positions include all positions except positions 12-14, counting from the 5′-end of the antisense strand.

50. The dsRNA agent of claim 42-44, wherein the internal positions include all positions except positions 11-13 on the sense strand, counting from the 3′-end, and positions 12-14 on the antisense strand, counting from the 5′-end.

51. The dsRNA agent of any one of claims 15-50, wherein the one or more lipophilic moieties are conjugated to one or more of the internal positions selected from the group consisting of positions 4-8 and 13-18 on the sense strand, and positions 6-10 and 15-18 on the antisense strand, counting from the 5′end of each strand.

52. The dsRNA agent of claim 51, wherein the one or more lipophilic moieties are conjugated to one or more of the internal positions selected from the group consisting of positions 5, 6, 7, 15, and 17 on the sense strand, and positions 15 and 17 on the antisense strand, counting from the 5′-end of each strand.

53. The dsRNA agent of claim 15, wherein the internal positions in the double stranded region exclude a cleavage site region of the sense strand.

54. The dsRNA agent of any one of claims 14-53, wherein the sense strand is 21 nucleotides in length, the antisense strand is 23 nucleotides in length, and the lipophilic moiety is conjugated to position 21, position 20, position 15, position 1, position 7, position 6, or position 2 of the sense strand or position 16 of the antisense strand.

55. The dsRNA agent of claim 54, wherein the lipophilic moiety is conjugated to position 21, position 20, position 15, position 1, or position 7 of the sense strand.

56. The dsRNA agent of claim 54, wherein the lipophilic moiety is conjugated to position 21, position 20, or position 15 of the sense strand.

57. The dsRNA agent of claim 54, wherein the lipophilic moiety is conjugated to position 20 or position 15 of the sense strand.

58. The dsRNA agent of claim 54, wherein the lipophilic moiety is conjugated to position 16 of the antisense strand.

59. The dsRNA agent of any one of claims 14-58, wherein the lipophilic moiety is an aliphatic, alicyclic, or polyalicyclic compound.

60. The dsRNA agent of claim 59, wherein the lipophilic moiety is selected from the group consisting of lipid, cholesterol, retinoic acid, cholic acid, adamantane acetic acid, 1-pyrene butyric acid, dihydrotestosterone, 1,3-bis-O(hexadecyl)glycerol, geranyloxyhexyanol, hexadecylglycerol, borneol, menthol, 1,3-propanediol, heptadecyl group, palmitic acid, myristic acid, O3-(oleoyl) lithocholic acid, O3-(oleoyl)cholenic acid, dimethoxytrityl, or phenoxazine.

61. The dsRNA agent of claim 59, wherein the lipophilic moiety contains a saturated or unsaturated C4-C30 hydrocarbon chain, and an optional functional group selected from the group consisting of hydroxyl, amine, carboxylic acid, sulfonate, phosphate, thiol, azide, and alkyne.

62. The dsRNA agent of claim 61, wherein the lipophilic moiety contains a saturated or unsaturated C6-C18 hydrocarbon chain.

63. The dsRNA agent of claim 61, wherein the lipophilic moiety contains a saturated or unsaturated C16 hydrocarbon chain.

64. The dsRNA agent of claim 62, wherein the saturated or unsaturated C16 hydrocarbon chain is conjugated to position 6, counting from the 5′-end of the strand.

65. The dsRNA agent of any one of claims 14-64, wherein the lipophilic moiety is conjugated via a carrier that replaces one or more nucleotide(s) in the internal position(s) or the double stranded region.

66. The dsRNA agent of claim 65, wherein the carrier is a cyclic group selected from the group consisting of pyrrolidinyl, pyrazolinyl, pyrazolidinyl, imidazolinyl, imidazolidinyl, piperidinyl, piperazinyl, [1,3] dioxolanyl, oxazolidinyl, isoxazolidinyl, morpholinyl, thiazolidinyl, isothiazolidinyl, quinoxalinyl, pyridazinonyl, tetrahydrofuranyl, and decalinyl; or is an acyclic moiety based on a serinol backbone or a diethanolamine backbone.

67. The dsRNA agent of any one of claims 14-64, wherein the lipophilic moiety is conjugated to the double-stranded iRNA agent via a linker containing an ether, thioether, urea, carbonate, amine, amide, maleimide-thioether, disulfide, phosphodiester, sulfonamide linkage, a product of a click reaction, or carbamate.

68. The double-stranded iRNA agent of any one of claims 14-67, wherein the lipophilic moiety is conjugated to a nucleobase, sugar moiety, or internucleosidic linkage.

69. The dsRNA agent of any one of claims 14-68, wherein the lipophilic moiety or targeting ligand is conjugated via a bio-cleavable linker selected from the group consisting of DNA, RNA, disulfide, amide, functionalized monosaccharides or oligosaccharides of galactosamine, glucosamine, glucose, galactose, mannose, and combinations thereof.

70. The dsRNA agent of any one of claims 14-69, wherein the 3′ end of the sense strand is protected via an end cap which is a cyclic group having an amine, said cyclic group being selected from the group consisting of pyrrolidinyl, pyrazolinyl, pyrazolidinyl, imidazolinyl, imidazolidinyl, piperidinyl, piperazinyl, [1,3]dioxolanyl, oxazolidinyl, isoxazolidinyl, morpholinyl, thiazolidinyl, isothiazolidinyl, quinoxalinyl, pyridazinonyl, tetrahydrofuranyl, and decalinyl.

71. The dsRNA agent of any one of claims 14-68, further comprising a targeting ligand that targets a neuronal cell.

72. The dsRNA agent of any one of claims 1-71, further comprising
a terminal, chiral modification occurring at the first internucleotide linkage at the 3′ end of the antisense strand, having the linkage phosphorus atom in Sp configuration,
a terminal, chiral modification occurring at the first internucleotide linkage at the 5′ end of the antisense strand, having the linkage phosphorus atom in Rp configuration, and
a terminal, chiral modification occurring at the first internucleotide linkage at the 5′ end of the sense strand, having the linkage phosphorus atom in either Rp configuration or Sp configuration.

73. The dsRNA agent of any one of claims 1-71, further comprising
a terminal, chiral modification occurring at the first and second internucleotide linkages at the 3′ end of the antisense strand, having the linkage phosphorus atom in Sp configuration,
a terminal, chiral modification occurring at the first internucleotide linkage at the 5′ end of the antisense strand, having the linkage phosphorus atom in Rp configuration, and
a terminal, chiral modification occurring at the first internucleotide linkage at the 5′ end of the sense strand, having the linkage phosphorus atom in either Rp or Sp configuration.

74. The dsRNA agent of any one of claims 1-71, further comprising
a terminal, chiral modification occurring at the first, second and third internucleotide linkages at the 3′ end of the antisense strand, having the linkage phosphorus atom in Sp configuration,
a terminal, chiral modification occurring at the first internucleotide linkage at the 5′ end of the antisense strand, having the linkage phosphorus atom in Rp configuration, and
a terminal, chiral modification occurring at the first internucleotide linkage at the 5′ end of the sense strand, having the linkage phosphorus atom in either Rp or Sp configuration.

75. The dsRNA agent of any one of claims 1-71, further comprising
a terminal, chiral modification occurring at the first, and second internucleotide linkages at the 3′ end of the antisense strand, having the linkage phosphorus atom in Sp configuration,
a terminal, chiral modification occurring at the third internucleotide linkages at the 3′ end of the antisense strand, having the linkage phosphorus atom in Rp configuration,
a terminal, chiral modification occurring at the first internucleotide linkage at the 5′ end of the antisense strand, having the linkage phosphorus atom in Rp configuration, and
a terminal, chiral modification occurring at the first internucleotide linkage at the 5′ end of the sense strand, having the linkage phosphorus atom in either Rp or Sp configuration.

76. The dsRNA agent of any one of claims 1-71, further comprising
a terminal, chiral modification occurring at the first, and second internucleotide linkages at the 3′ end of the antisense strand, having the linkage phosphorus atom in Sp configuration,
a terminal, chiral modification occurring at the first, and second internucleotide linkages at the 5′ end of the antisense strand, having the linkage phosphorus atom in Rp configuration, and
a terminal, chiral modification occurring at the first internucleotide linkage at the 5′ end of the sense strand, having the linkage phosphorus atom in either Rp or Sp configuration.

77. The dsRNA agent of any one of claims 1-76, further comprising a phosphate or phosphate mimic at the 5′-end of the antisense strand.

78. The dsRNA agent of claim 77, wherein the phosphate mimic is a 5′-vinyl phosphonate (VP).

79. The dsRNA agent of any one of claims 1-78, wherein the base pair at the 1 position of the 5′-end of the antisense strand of the duplex is an AU base pair.

80. The dsRNA agent of any one of claims 1-79, wherein the sense strand has a total of 21 nucleotides and the antisense strand has a total of 23 nucleotides.

81. A cell containing the dsRNA agent of any one of claims 1-80.

82. A pharmaceutical composition for inhibiting expression of a gene encoding 4R-tau, comprising the dsRNA agent of any one of claims 1-80.

83. A pharmaceutical composition comprising the dsRNA agent of any one of claims 1-80 and a lipid formulation.

84. A pharmaceutical composition for preferential inhibition of exon 10-containing MAPT transcripts, comprising the dsRNA agent of any one of claims 1-80.

85. The pharmaceutical composition of any one of claims 82-84, wherein dsRNA agent is in an unbuffered solution.

86. The pharmaceutical composition of claim 85, wherein the unbuffered solution is saline or water.

87. The pharmaceutical composition of any one of claims 82-84, wherein said dsRNA agent is in a buffer solution.

88. The pharmaceutical composition of claim 87, wherein the buffer solution comprises acetate, citrate, prolamine, carbonate, or phosphate or any combination thereof.

89. The pharmaceutical composition of claim 87, wherein the buffer solution is phosphate buffered saline (PBS).

90. A method of inhibiting expression of 4R-tau in a cell, the method comprising contacting the cell with the dsRNA agent of any one of claims 1-80, or the pharmaceutical composition of any one of claims 82-89, thereby inhibiting expression of 4R-tau in the cell.

91. A method of reducing abberant expression of exon 10-containing MAPT transcripts in a cell, the method comprising contacting the cell with the dsRNA agent of any one of claims 1-80, or the pharmaceutical composition of any one of claims 82-89, thereby degrading exon 10-containing MAPT transcripts in the cell.

92. The method of claim 91, wherein the cell is within a subject.

93. The method of claim 92, wherein the subject is a human.

94. The method of claim 93, wherein the subject has a 4R-tau-associated disorder.

95. The method of claim 94, wherein the 4R-tau-associated disorder is a neurodegenerative disorder.

96. The method of claim 95, wherein the neurodegenerative disorder is associated with an abnormality of MAPT gene encoded protein 4R-tau.

97. The method of claim 96, wherein the abnormality of MAPT gene encoded protein 4R-tau results in aggregation of Tau in subject's brain.

98. The method of claim 96, wherein the neurodegenerative disorder is a familial disorder.

99. The method of claim 96, wherein the neurodegenerative disorder is a sporadic disorder.

100. The method of claim 96, wherein the disorder is a 4R-tauopathy selected from the group consisting of progressive supranuclear palsy (PSP), progressive supranuclear palsy-Richardson's syndrome (PSP-RS), corticobasal syndrome (CBD), argyrophilic grain disease (AGD), frontotemporal lobar degeneration due to tau (FTLD-tau), FTLD-tau due to MAPT mutation, multiple system tauopathy with presensile dementia (MSTD), globular glial tauopathy (GGT), Parkinsonism similar to Parkinson's disease, nonfluent variant of primary progressive aphasia (nfvPPA), behavioral variant of frontotemporal dementia (bvFTD), primary akinesia with gait freezing (PAGF), primary lateral sclerosis (PLS), familial multiple system tauopathy with presenile dementia (FMSTD), familial progressive subcortical gliosis (familial pSG), pallido-ponto-nigral degeneration (pPND), familial frontotemporal dementia (e.g., FTD-Kumamoto), N279K tauopathy, rapidly progressive Alzheimer's Disease (rpAD), and sporadic Alzheimer's Disease (spAD).

101. The method of claim 100, wherein the 4R-tauopathy is selected from the group consisting of progressive supranuclear palsy (PSP), progressive supranuclear palsy-Richardson's syndrome (PSP-RS), corticobasal syndrome (CBD), argyrophilic grain disease (AGD), multiple system tauopathy with presensile dementia (MSTD), globular glial tauopathy (GGT), rapidly progressive Alzheimer's Disease, and (rpAD) sporadic Alzheimer's Disease (spAD).

102. The method of claim 101, wherein the 4R-tauopathy is progressive supranuclear palsy (PSP).

103. The method of claim 101, wherein the 4R-tauopathy is rapidly progressive Alzheimer's Disease (rpAD).

104. The method of claim 101, wherein the 4R-tauopathy is sporadic Alzheimer's Disease (spAD).

105. The method of any one of claims 90-104, wherein contacting the cell with the dsRNA agent inhibits the expression of 4R-tau by at least 25%.

106. The method of any one of claims 90-104, wherein inhibiting expression of 4R-tau decreases 4R-tau protein level in serum of the subject by at least 25%.

107. A method of treating a subject having a disorder that would benefit from reduction in 4R-tau expression, comprising administering to the subject a therapeutically effective amount of the dsRNA agent of any one of claims 1-80, or the pharmaceutical composition of any one of claims 82-89, thereby treating the subject having the disorder that would benefit from reduction in 4R-tau expression.

108. A method of preventing at least one symptom in a subject having a disorder that would benefit from reduction in 4R-tau expression, comprising administering to the subject a prophylactically effective amount of the dsRNA agent of any one of claims 1-80, or the pharmaceutical composition of any one of claims 82-89, thereby preventing at least one symptom in the subject having the disorder that would benefit from reduction in 4R-tau expression.

109. The method of claim 107 or 108, wherein the disorder is associated with an abnormality of MAPT gene encoded protein 4R-tau.

110. The method of claim 109, wherein the abnormality of MAPT gene encoded protein 4R-tau results in aggregation of 4R-tau in the subject's brain.

111. The method of claim 109, wherein the disorder is a 4R-tauopathy selected from the group consisting of progressive supranuclear palsy (PSP), progressive supranuclear palsy-Richardson's syndrome (PSP-RS), corticobasal syndrome (CBD), argyrophilic grain disease (AGD), frontotemporal lobar degeneration due to tau (FTLD-tau), FTLD-tau due to MAPT mutation, multiple system tauopathy with presensile dementia (MSTD), globular glial tauopathy (GGT), Parkinsonism similar to Parkinson's disease, nonfluent variant of primary progressive aphasia (nfvPPA), behavioral variant of frontotemporal dementia (bvFTD), primary akinesia with gait freezing (PAGF), primary lateral sclerosis (PLS), familial multiple system tauopathy with presenile dementia (FMSTD), familial progressive subcortical gliosis (familial pSG), pallido-ponto-nigral degeneration (pPND), familial frontotemporal dementia (e.g., FTD-Kumamoto), N279K tauopathy, rapidly progressive Alzheimer's Disease (rpAD), and sporadic Alzheimer's Disease (spAD).

112. The method of claim 111, wherein the 4R-tauopathy is selected from the group consisting of progressive supranuclear palsy (PSP), progressive supranuclear palsy-Richardson's syndrome (PSP-RS), corticobasal syndrome (CBD), argyrophilic grain disease (AGD), multiple system tauopathy with presensile dementia (MSTD), globular glial tauopathy (GGT), rapidly progressive Alzheimer's Disease, and (rpAD) sporadic Alzheimer's Disease (spAD).

113. The method of claim 112, wherein the 4R-tauopathy is progressive supranuclear palsy (PSP).

114. The method of claim 112, wherein the 4R-tauopathy is rapidly progressive Alzheimer's Disease (rpAD).

115. The method of claim 112, wherein the 4R-tauopathy is sporadic Alzheimer's Disease (spAD).

116. The method of any one of claims 107-115, wherein the subject is human.

117. The method of claim 116, wherein the administration of the dsRNA agent, or the pharmaceutical composition, causes a decrease in 4R-tau aggregation in the subject's brain.

118. The method of any one of claims 107-117, wherein the dsRNA agent is administered to the subject at a dose of about 0.01 mg/kg to about 50 mg/kg.

119. The method of any one of claims 107-118, wherein the dsRNA agent is administered to the subject intrathecally (IT) or intracerebroventricularly (ICV).

120. The method of any one of claims 107-118, wherein the dsRNA agent is administered to the subject intracisternally.

121. The method of any one of claims 107-120, further comprising determining the level of 4R-tau in a sample(s) from the subject.

122. The method of claim 121, wherein the level of 4R-tau in the subject sample(s) is a 4R-tau protein level in a cerebrospinal fluid sample(s).

123. The method of any one of claims 92-122, further comprising administering to the subject an additional therapeutic agent.

124. A kit comprising the dsRNA agent of any one of claims 1-80, or the pharmaceutical composition of any one of claims 82-89.

125. A vial comprising the dsRNA agent of any one of claims 1-80, or the pharmaceutical composition of any one of claims 82-89.

126. A syringe comprising the dsRNA agent of any one of claims 1-80, or the pharmaceutical composition of any one of claims 82-89.

127. An intrathecal pump comprising the dsRNA agent of any one of claims 1-80, or the pharmaceutical composition of any one of claims 82-89.

128. A solid composition prepared by lyophilizing a pharmaceutical composition according to any one of claims 82-89.

The application's sequence listing, which the Patent Office published only in electronic form, follows.

SEQUENCE LISTING (645 sequences)

SEQ ID NO: 1 - RNA, 5544 nt, Homo sapiens
  source 1..5544: mol_type = mRNA
ggacggccgagcggcagggcgctcgcgcgcgcccactagtggccggaggagaaggctcccgcggaggccgcgctgcccgccccctcccctggggaggctcgcgttcccgctgctcgcgcctgcgccgcccgccggcctcaggaacgcgccctcttcgccggcgcgcgccctcgcagtcaccgccacccaccagctccggcaccaacagcagcgccgctgccaccgcccaccttctgccgccgccaccacagccaccttctcctcctccgctgtcctctcccgtcctcgcctctgtcgactatcaggtgaactttgaaccaggatggctgagccccgccaggagttcgaagtgatggaagatcacgctgggacgtacgggttgggggacaggaaagatcaggggggctacaccatgcaccaagaccaagagggtgacacggacgctggcctgaaagctgaagaagcaggcattggagacacccccagcctggaagacgaagctgctggtcacgtgacccaagctcgcatggtcagtaaaagcaaagacgggactggaagcgatgacaaaaaagccaagggggctgatggtaaaacgaagatcgccacaccgcggggagcagcccctccaggccagaagggccaggccaacgccaccaggattccagcaaaaaccccgcccgctccaaagacaccacccagctctggtgaacctccaaaatcaggggatcgcagcggctacagcagccccggctccccaggcactcccggcagccgctcccgcaccccgtcccttccaaccccacccacccgggagcccaagaaggtggcagtggtccgtactccacccaagtcgccgtcttccgccaagagccgcctgcagacagcccccgtgcccatgccagacctgaagaatgtcaagtccaagatcggctccactgagaacctgaagcaccagccgggaggcgggaaggtgcaaatagtctacaaaccagttgacctgagcaaggtgacctccaagtgtggctcattaggcaacatccatcataaaccaggaggtggccaggtggaagtaaaatctgagaagcttgacttcaaggacagagtccagtcgaagattgggtccctggacaatatcacccacgtccctggcggaggaaataaaaagattgaaacccacaagctgaccttccgcgagaacgccaaagccaagacagaccacggggcggagatcgtgtacaagtcgccagtggtgtctggggacacgtctccacggcatctcagcaatgtctcctccaccggcagcatcgacatggtagactcgccccagctcgccacgctagctgacgaggtgtctgcctccctggccaagcagggtttgtgatcaggcccctggggcggtcaataattgtggagaggagagaatgagagagtgtggaaaaaaaaagaataatgacccggcccccgccctctgcccccagctgctcctcgcagttcggttaattggttaatcacttaacctgcttttgtcactcggctttggctcgggacttcaaaatcagtgatgggagtaagagcaaatttcatctttccaaattgatgggtgggctagtaataaaatatttaaaaaaaaacattcaaaaacatggccacatccaacatttcctcaggcaattccttttgattcttttttcttccccctccatgtagaagagggagaaggagaggctctgaaagctgcttctgggggatttcaagggactgggggtgccaaccacctctggccctgttgtgggggtgtcacagaggcagtggcagcaacaaaggatttgaaacttggtgtgttcgtggagccacaggcagacgatgtcaaccttgtgtgagtgtgacgggggttggggtggggcgggaggccacgggggaggccgaggcaggggctgggcagaggggagaggaagcacaagaagtgggagtgggagaggaagccacgtgctggagagtagacatccccctccttgccgctgggagagccaaggcctatgccacctgcagcgtctgagcggccgcctgtccttggtggccgggggtgggggcctgctgtgggtcagtgtgccaccctctgcagggcagcctgtgggagaagggacagcgggtaaaaagagaaggcaagctggcaggagggtggcacttcgtggatgacctccttagaaaagactgaccttgatgtcttgagagcgctggcctcttcctccctccctgcagggtagggggcctgagttgaggggcttccctctgctccacagaaaccctgttttattgagttctgaaggttggaactgctgccatgattttggccactttgcagacctgggactttagggctaaccagttctctttgtaaggacttgtgcctcttgggagacgtccacccgtttccaagcctgggccactggcatctctggagtgtgtgggggtctgggaggcaggtcccgagccccctgtccttcccacggccactgcagtcaccccgtctgcgccgctgtgctgttgtctgccgtgagagcccaatcactgcctatacccctcatcacacgtcacaatgtcccgaattcccagcctcaccaccccttctcagtaatgaccctggttggttgcaggaggtacctactccatactgagggtgaaattaagggaaggcaaagtccaggcacaagagtgggaccccagcctctcactctcagttccactcatccaactgggaccctcaccacgaatctcatgatctgattcggttccctgtctcctcctcccgtcacagatgtgagccagggcactgctcagctgtgaccctaggtgtttctgccttgttgacatggagagagccctttcccctgagaaggcctggccccttcctgtgctgagcccacagcagcaggctgggtgtcttggttgtcagtggtggcaccaggatggaagggcaaggcacccagggcaggcccacagtcccgctgtcccccacttgcaccctagcttgtagctgccaacctcccagacagcccagcccgctgctcagctccacatgcatagtatcagccctccacacccgacaaaggggaacacacccccttggaaatggttcttttcccccagtcccagctggaagccatgctgtctgttctgctggagcagctgaacatatacatagatgttgccctgccctccccatctgcaccctgttgagttgtagttggatttgtctgtttatgcttggattcaccagagtgactatgatagtgaaaagaaaaaaaaaaaaaaaaaaggacgcatgtatcttgaaatgcttgtaaagaggtttctaacccaccctcacgaggtgtctctcacccccacactgggactcgtgtggcctgtgtggtgccaccctgctggggcctcccaagttttgaaaggctttcctcagcacctgggacccaacagagaccagcttctagcagctaaggaggccgttcagctgtgacgaaggcctgaagcacaggattaggactgaagcgatgatgtccccttccctacttccccttggggctccctgtgtcagggcacagactaggtcttgtggctggtctggcttgcggcgcgaggatggttctctctggtcatagcccgaagtctcatggcagtcccaaaggaggcttacaactcctgcatcacaagaaaaaggaagccactgccagctggggggatctgcagctcccagaagctccgtgagcctcagccacccctcagactgggttcctctccaagctcgccctctggaggggcagcgcagcctcccaccaagggccctgcgaccacagcagggattgggatgaattgcctgtcctggatctgctctagaggcccaagctgcctgcctgaggaaggatgacttgacaagtcaggagacactgttcccaaagccttgaccagagcacctcagcccgctgaccttgcacaaactccatctgctgccatgagaaaagggaagccgcctttgcaaaacattgctgcctaaagaaactcagcagcctcaggcccaattctgccacttctggtttgggtacagttaaaggcaaccctgagggacttggcagtagaaatccagggcctcccctggggctggcagcttcgtgtgcagctagagctttacctgaaaggaagtctctgggcccagaactctccaccaagagcctccctgccgttcgctgagtcccagcaattctcctaagttgaagggatctgagaaggagaaggaaatgtggggtagatttggtggtggttagagatatgcccccctcattactgccaacagtttcggctgcatttcttcacgcacctcggttcctcttcctgaagttcttgtgccctgctcttcagcaccatgggccttcttatacggaaggctctgggatctcccccttgtggggcaggctcttggggccagcctaagatcatggtttagggtgatcagtgctggcagataaattgaaaaggcacgctggcttgtgatcttaaatgaggacaatccccccagggctgggcactcctcccctcccctcacttctcccacctgcagagccagtgtccttgggtgggctagataggatatactgtatgccggctccttcaagctgctgactcactttatcaatagttccatttaaattgacttcagtggtgagactgtatcctgtttgctattgcttgttgtgctatggggggaggggggaggaatgtgtaagatagttaacatgggcaaagggagatcttggggtgcagcacttaaactgcctcgtaacccttttcatgatttcaaccacatttgctagagggagggagcagccacggagttagaggcccttggggtttctcttttccactgacaggctttcccaggcagctggctagttcattccctccccagccaggtgcaggcgtaggaatatggacatctggttgctttggcctgctgccctctttcaggggtcctaagcccacaatcatgcctccctaagaccttggcatccttccctctaagccgttggcacctctgtgccacctctcacactggctccagacacacagcctgtgcttttggagctgagatcactcgcttcaccctcctcatctttgttctccaagtaaagccacgaggtcggggcgagggcagaggtgatcacctgcgtgtcccatctacagacctgcagcttcataaaacttctgatttctcttcagctttgaaaagggttaccctgggcactggcctagagcctcacctcctaatagacttagccccatgagtttgccatgttgagcaggactatttctggcacttgcaagtcccatgatttcttcggtaattctgagggtggggggagggacatgaaatcatcttagcttagctttctgtctgtgaatgtctatatagtgtattgtgtgttttaacaaatgatttacactgactgttgctgtaaaagtgaatttggaaataaagttattactctgattaaa

SEQ ID NO: 2 - RNA, 5544 nt, Homo sapiens
  source 1..5544: mol_type = other RNA
tttaatcagagtaataactttatttccaaattcacttttacagcaacagtcagtgtaaatcatttgttaaaacacacaatacactatatagacattcacagacagaaagctaagctaagatgatttcatgtccctccccccaccctcagaattaccgaagaaatcatgggacttgcaagtgccagaaatagtcctgctcaacatggcaaactcatggggctaagtctattaggaggtgaggctctaggccagtgcccagggtaacccttttcaaagctgaagagaaatcagaagttttatgaagctgcaggtctgtagatgggacacgcaggtgatcacctctgccctcgccccgacctcgtggctttacttggagaacaaagatgaggagggtgaagcgagtgatctcagctccaaaagcacaggctgtgtgtctggagccagtgtgagaggtggcacagaggtgccaacggcttagagggaaggatgccaaggtcttagggaggcatgattgtgggcttaggacccctgaaagagggcagcaggccaaagcaaccagatgtccatattcctacgcctgcacctggctggggagggaatgaactagccagctgcctgggaaagcctgtcagtggaaaagagaaaccccaagggcctctaactccgtggctgctccctccctctagcaaatgtggttgaaatcatgaaaagggttacgaggcagtttaagtgctgcaccccaagatctccctttgcccatgttaactatcttacacattcctcccccctccccccatagcacaacaagcaatagcaaacaggatacagtctcaccactgaagtcaatttaaatggaactattgataaagtgagtcagcagcttgaaggagccggcatacagtatatcctatctagcccacccaaggacactggctctgcaggtgggagaagtgaggggaggggaggagtgcccagccctggggggattgtcctcatttaagatcacaagccagcgtgccttttcaatttatctgccagcactgatcaccctaaaccatgatcttaggctggccccaagagcctgccccacaagggggagatcccagagccttccgtataagaaggcccatggtgctgaagagcagggcacaagaacttcaggaagaggaaccgaggtgcgtgaagaaatgcagccgaaactgttggcagtaatgaggggggcatatctctaaccaccaccaaatctaccccacatttccttctccttctcagatcccttcaacttaggagaattgctgggactcagcgaacggcagggaggctcttggtggagagttctgggcccagagacttcctttcaggtaaagctctagctgcacacgaagctgccagccccaggggaggccctggatttctactgccaagtccctcagggttgcctttaactgtacccaaaccagaagtggcagaattgggcctgaggctgctgagtttctttaggcagcaatgttttgcaaaggcggcttcccttttctcatggcagcagatggagtttgtgcaaggtcagcgggctgaggtgctctggtcaaggctttgggaacagtgtctcctgacttgtcaagtcatccttcctcaggcaggcagcttgggcctctagagcagatccaggacaggcaattcatcccaatccctgctgtggtcgcagggcccttggtgggaggctgcgctgcccctccagagggcgagcttggagaggaacccagtctgaggggtggctgaggctcacggagcttctgggagctgcagatccccccagctggcagtggcttcctttttcttgtgatgcaggagttgtaagcctcctttgggactgccatgagacttcgggctatgaccagagagaaccatcctcgcgccgcaagccagaccagccacaagacctagtctgtgccctgacacagggagccccaaggggaagtagggaaggggacatcatcgcttcagtcctaatcctgtgcttcaggccttcgtcacagctgaacggcctccttagctgctagaagctggtctctgttgggtcccaggtgctgaggaaagcctttcaaaacttgggaggccccagcagggtggcaccacacaggccacacgagtcccagtgtgggggtgagagacacctcgtgagggtgggttagaaacctctttacaagcatttcaagatacatgcgtccttttttttttttttttttcttttcactatcatagtcactctggtgaatccaagcataaacagacaaatccaactacaactcaacagggtgcagatggggagggcagggcaacatctatgtatatgttcagctgctccagcagaacagacagcatggcttccagctgggactgggggaaaagaaccatttccaagggggtgtgttcccctttgtcgggtgtggagggctgatactatgcatgtggagctgagcagcgggctgggctgtctgggaggttggcagctacaagctagggtgcaagtgggggacagcgggactgtgggcctgccctgggtgccttgcccttccatcctggtgccaccactgacaaccaagacacccagcctgctgctgtgggctcagcacaggaaggggccaggccttctcaggggaaagggctctctccatgtcaacaaggcagaaacacctagggtcacagctgagcagtgccctggctcacatctgtgacgggaggaggagacagggaaccgaatcagatcatgagattcgtggtgagggtcccagttggatgagtggaactgagagtgagaggctggggtcccactcttgtgcctggactttgccttcccttaatttcaccctcagtatggagtaggtacctcctgcaaccaaccagggtcattactgagaaggggtggtgaggctgggaattcgggacattgtgacgtgtgatgaggggtataggcagtgattgggctctcacggcagacaacagcacagcggcgcagacggggtgactgcagtggccgtgggaaggacagggggctcgggacctgcctcccagacccccacacactccagagatgccagtggcccaggcttggaaacgggtggacgtctcccaagaggcacaagtccttacaaagagaactggttagccctaaagtcccaggtctgcaaagtggccaaaatcatggcagcagttccaaccttcagaactcaataaaacagggtttctgtggagcagagggaagcccctcaactcaggccccctaccctgcagggagggaggaagaggccagcgctctcaagacatcaaggtcagtcttttctaaggaggtcatccacgaagtgccaccctcctgccagcttgccttctctttttacccgctgtcccttctcccacaggctgccctgcagagggtggcacactgacccacagcaggcccccacccccggccaccaaggacaggcggccgctcagacgctgcaggtggcataggccttggctctcccagcggcaaggagggggatgtctactctccagcacgtggcttcctctcccactcccacttcttgtgcttcctctcccctctgcccagcccctgcctcggcctcccccgtggcctcccgccccaccccaacccccgtcacactcacacaaggttgacatcgtctgcctgtggctccacgaacacaccaagtttcaaatcctttgttgctgccactgcctctgtgacacccccacaacagggccagaggtggttggcacccccagtcccttgaaatcccccagaagcagctttcagagcctctccttctccctcttctacatggagggggaagaaaaaagaatcaaaaggaattgcctgaggaaatgttggatgtggccatgtttttgaatgtttttttttaaatattttattactagcccacccatcaatttggaaagatgaaatttgctcttactcccatcactgattttgaagtcccgagccaaagccgagtgacaaaagcaggttaagtgattaaccaattaaccgaactgcgaggagcagctgggggcagagggcgggggccgggtcattattctttttttttccacactctctcattctctcctctccacaattattgaccgccccaggggcctgatcacaaaccctgcttggccagggaggcagacacctcgtcagctagcgtggcgagctggggcgagtctaccatgtcgatgctgccggtggaggagacattgctgagatgccgtggagacgtgtccccagacaccactggcgacttgtacacgatctccgccccgtggtctgtcttggctttggcgttctcgcggaaggtcagcttgtgggtttcaatctttttatttcctccgccagggacgtgggtgatattgtccagggacccaatcttcgactggactctgtccttgaagtcaagcttctcagattttacttccacctggccacctcctggtttatgatggatgttgcctaatgagccacacttggaggtcaccttgctcaggtcaactggtttgtagactatttgcaccttcccgcctcccggctggtgcttcaggttctcagtggagccgatcttggacttgacattcttcaggtctggcatgggcacgggggctgtctgcaggcggctcttggcggaagacggcgacttgggtggagtacggaccactgccaccttcttgggctcccgggtgggtggggttggaagggacggggtgcgggagcggctgccgggagtgcctggggagccggggctgctgtagccgctgcgatcccctgattttggaggttcaccagagctgggtggtgtctttggagcgggcggggtttttgctggaatcctggtggcgttggcctggcccttctggcctggaggggctgctccccgcggtgtggcgatcttcgttttaccatcagcccccttggcttttttgtcatcgcttccagtcccgtctttgcttttactgaccatgcgagcttgggtcacgtgaccagcagcttcgtcttccaggctgggggtgtctccaatgcctgcttcttcagctttcaggccagcgtccgtgtcaccctcttggtcttggtgcatggtgtagcccccctgatctttcctgtcccccaacccgtacgtcccagcgtgatcttccatcacttcgaactcctggcggggctcagccatcctggttcaaagttcacctgatagtcgacagaggcgaggacgggagaggacagcggaggaggagaaggtggctgtggtggcggcggcagaaggtgggcggtggcagcggcgctgctgttggtgccggagctggtgggtggcggtgactgcgagggcgcgcgccggcgaagagggcgcgttcctgaggccggcgggcggcgcaggcgcgagcagcgggaacgcgagcctccccaggggagggggcgggcagcgcggcctccgcgggagccttctcctccggccactagtgggcgcgcgcgagcgccctgccgctcggccgtcc

SEQ ID NO: 3 - RNA, 5639 nt, Homo sapiens
  source 1..5639: mol_type = mRNA
gcagtcaccgccacccaccagctccggcaccaacagcagcgccgctgccaccgcccaccttctgccgccgccaccacagccaccttctcctcctccgctgtcctctcccgtcctcgcctctgtcgactatcaggtgaactttgaaccaggatggctgagccccgccaggagttcgaagtgatggaagatcacgctgggacgtacgggttgggggacaggaaagatcaggggggctacaccatgcaccaagaccaagagggtgacacggacgctggcctgaaagaatctcccctgcagacccccactgaggacggatctgaggaaccgggctctgaaacctctgatgctaagagcactccaacagcggaagatgtgacagcacccttagtggatgagggagctcccggcaagcaggctgccgcgcagccccacacggagatcccagaaggaaccacagctgaagaagcaggcattggagacacccccagcctggaagacgaagctgctggtcacgtgacccaagctcgcatggtcagtaaaagcaaagacgggactggaagcgatgacaaaaaagccaagggggctgatggtaaaacgaagatcgccacaccgcggggagcagcccctccaggccagaagggccaggccaacgccaccaggattccagcaaaaaccccgcccgctccaaagacaccacccagctctggtgaacctccaaaatcaggggatcgcagcggctacagcagccccggctccccaggcactcccggcagccgctcccgcaccccgtcccttccaaccccacccacccgggagcccaagaaggtggcagtggtccgtactccacccaagtcgccgtcttccgccaagagccgcctgcagacagcccccgtgcccatgccagacctgaagaatgtcaagtccaagatcggctccactgagaacctgaagcaccagccgggaggcgggaaggtgcagataattaataagaagctggatcttagcaacgtccagtccaagtgtggctcaaaggataatatcaaacacgtcccgggaggcggcagtgtgcaaatagtctacaaaccagttgacctgagcaaggtgacctccaagtgtggctcattaggcaacatccatcataaaccaggaggtggccaggtggaagtaaaatctgagaagcttgacttcaaggacagagtccagtcgaagattgggtccctggacaatatcacccacgtccctggcggaggaaataaaaagattgaaacccacaagctgaccttccgcgagaacgccaaagccaagacagaccacggggcggagatcgtgtacaagtcgccagtggtgtctggggacacgtctccacggcatctcagcaatgtctcctccaccggcagcatcgacatggtagactcgccccagctcgccacgctagctgacgaggtgtctgcctccctggccaagcagggtttgtgatcaggcccctggggcggtcaataattgtggagaggagagaatgagagagtgtggaaaaaaaaagaataatgacccggcccccgccctctgcccccagctgctcctcgcagttcggttaattggttaatcacttaacctgcttttgtcactcggctttggctcgggacttcaaaatcagtgatgggagtaagagcaaatttcatctttccaaattgatgggtgggctagtaataaaatatttaaaaaaaaacattcaaaaacatggccacatccaacatttcctcaggcaattccttttgattcttttttcttccccctccatgtagaagagggagaaggagaggctctgaaagctgcttctgggggatttcaagggactgggggtgccaaccacctctggccctgttgtgggggtgtcacagaggcagtggcagcaacaaaggatttgaaacttggtgtgttcgtggagccacaggcagacgatgtcaaccttgtgtgagtgtgacgggggttggggtggggcgggaggccacgggggaggccgaggcaggggctgggcagaggggagaggaagcacaagaagtgggagtgggagaggaagccacgtgctggagagtagacatccccctccttgccgctgggagagccaaggcctatgccacctgcagcgtctgagcggccgcctgtccttggtggccgggggtgggggcctgctgtgggtcagtgtgccaccctctgcagggcagcctgtgggagaagggacagcgggtaaaaagagaaggcaagctggcaggagggtggcacttcgtggatgacctccttagaaaagactgaccttgatgtcttgagagcgctggcctcttcctccctccctgcagggtagggggcctgagttgaggggcttccctctgctccacagaaaccctgttttattgagttctgaaggttggaactgctgccatgattttggccactttgcagacctgggactttagggctaaccagttctctttgtaaggacttgtgcctcttgggagacgtccacccgtttccaagcctgggccactggcatctctggagtgtgtgggggtctgggaggcaggtcccgagccccctgtccttcccacggccactgcagtcaccccgtctgcgccgctgtgctgttgtctgccgtgagagcccaatcactgcctatacccctcatcacacgtcacaatgtcccgaattcccagcctcaccaccccttctcagtaatgaccctggttggttgcaggaggtacctactccatactgagggtgaaattaagggaaggcaaagtccaggcacaagagtgggaccccagcctctcactctcagttccactcatccaactgggaccctcaccacgaatctcatgatctgattcggttccctgtctcctcctcccgtcacagatgtgagccagggcactgctcagctgtgaccctaggtgtttctgccttgttgacatggagagagccctttcccctgagaaggcctggccccttcctgtgctgagcccacagcagcaggctgggtgtcttggttgtcagtggtggcaccaggatggaagggcaaggcacccagggcaggcccacagtcccgctgtcccccacttgcaccctagcttgtagctgccaacctcccagacagcccagcccgctgctcagctccacatgcatagtatcagccctccacacccgacaaaggggaacacacccccttggaaatggttcttttcccccagtcccagctggaagccatgctgtctgttctgctggagcagctgaacatatacatagatgttgccctgccctccccatctgcaccctgttgagttgtagttggatttgtctgtttatgcttggattcaccagagtgactatgatagtgaaaagaaaaaaaaaaaaaaaaaaggacgcatgtatcttgaaatgcttgtaaagaggtttctaacccaccctcacgaggtgtctctcacccccacactgggactcgtgtggcctgtgtggtgccaccctgctggggcctcccaagttttgaaaggctttcctcagcacctgggacccaacagagaccagcttctagcagctaaggaggccgttcagctgtgacgaaggcctgaagcacaggattaggactgaagcgatgatgtccccttccctacttccccttggggctccctgtgtcagggcacagactaggtcttgtggctggtctggcttgcggcgcgaggatggttctctctggtcatagcccgaagtctcatggcagtcccaaaggaggcttacaactcctgcatcacaagaaaaaggaagccactgccagctggggggatctgcagctcccagaagctccgtgagcctcagccacccctcagactgggttcctctccaagctcgccctctggaggggcagcgcagcctcccaccaagggccctgcgaccacagcagggattgggatgaattgcctgtcctggatctgctctagaggcccaagctgcctgcctgaggaaggatgacttgacaagtcaggagacactgttcccaaagccttgaccagagcacctcagcccgctgaccttgcacaaactccatctgctgccatgagaaaagggaagccgcctttgcaaaacattgctgcctaaagaaactcagcagcctcaggcccaattctgccacttctggtttgggtacagttaaaggcaaccctgagggacttggcagtagaaatccagggcctcccctggggctggcagcttcgtgtgcagctagagctttacctgaaaggaagtctctgggcccagaactctccaccaagagcctccctgccgttcgctgagtcccagcaattctcctaagttgaagggatctgagaaggagaaggaaatgtggggtagatttggtggtggttagagatatgcccccctcattactgccaacagtttcggctgcatttcttcacgcacctcggttcctcttcctgaagttcttgtgccctgctcttcagcaccatgggccttcttatacggaaggctctgggatctcccccttgtggggcaggctcttggggccagcctaagatcatggtttagggtgatcagtgctggcagataaattgaaaaggcacgctggcttgtgatcttaaatgaggacaatccccccagggctgggcactcctcccctcccctcacttctcccacctgcagagccagtgtccttgggtgggctagataggatatactgtatgccggctccttcaagctgctgactcactttatcaatagttccatttaaattgacttcagtggtgagactgtatcctgtttgctattgcttgttgtgctatggggggaggggggaggaatgtgtaagatagttaacatgggcaaagggagatcttggggtgcagcacttaaactgcctcgtaacccttttcatgatttcaaccacatttgctagagggagggagcagccacggagttagaggcccttggggtttctcttttccactgacaggctttcccaggcagctggctagttcattccctccccagccaggtgcaggcgtaggaatatggacatctggttgctttggcctgctgccctctttcaggggtcctaagcccacaatcatgcctccctaagaccttggcatccttccctctaagccgttggcacctctgtgccacctctcacactggctccagacacacagcctgtgcttttggagctgagatcactcgcttcaccctcctcatctttgttctccaagtaaagccacgaggtcggggcgagggcagaggtgatcacctgcgtgtcccatctacagacctgcagcttcataaaacttctgatttctcttcagctttgaaaagggttaccctgggcactggcctagagcctcacctcctaatagacttagccccatgagtttgccatgttgagcaggactatttctggcacttgcaagtcccatgatttcttcggtaattctgagggtggggggagggacatgaaatcatcttagcttagctttctgtctgtgaatgtctatatagtgtattgtgtgttttaacaaatgatttacactgactgttgctgtaaaagtgaatttggaaataaagttattactctgattaaa

SEQ ID NO: 4 - RNA, 5639 nt, Homo sapiens
  source 1..5639: mol_type = other RNA
tttaatcagagtaataactttatttccaaattcacttttacagcaacagtcagtgtaaatcatttgttaaaacacacaatacactatatagacattcacagacagaaagctaagctaagatgatttcatgtccctccccccaccctcagaattaccgaagaaatcatgggacttgcaagtgccagaaatagtcctgctcaacatggcaaactcatggggctaagtctattaggaggtgaggctctaggccagtgcccagggtaacccttttcaaagctgaagagaaatcagaagttttatgaagctgcaggtctgtagatgggacacgcaggtgatcacctctgccctcgccccgacctcgtggctttacttggagaacaaagatgaggagggtgaagcgagtgatctcagctccaaaagcacaggctgtgtgtctggagccagtgtgagaggtggcacagaggtgccaacggcttagagggaaggatgccaaggtcttagggaggcatgattgtgggcttaggacccctgaaagagggcagcaggccaaagcaaccagatgtccatattcctacgcctgcacctggctggggagggaatgaactagccagctgcctgggaaagcctgtcagtggaaaagagaaaccccaagggcctctaactccgtggctgctccctccctctagcaaatgtggttgaaatcatgaaaagggttacgaggcagtttaagtgctgcaccccaagatctccctttgcccatgttaactatcttacacattcctcccccctccccccatagcacaacaagcaatagcaaacaggatacagtctcaccactgaagtcaatttaaatggaactattgataaagtgagtcagcagcttgaaggagccggcatacagtatatcctatctagcccacccaaggacactggctctgcaggtgggagaagtgaggggaggggaggagtgcccagccctggggggattgtcctcatttaagatcacaagccagcgtgccttttcaatttatctgccagcactgatcaccctaaaccatgatcttaggctggccccaagagcctgccccacaagggggagatcccagagccttccgtataagaaggcccatggtgctgaagagcagggcacaagaacttcaggaagaggaaccgaggtgcgtgaagaaatgcagccgaaactgttggcagtaatgaggggggcatatctctaaccaccaccaaatctaccccacatttccttctccttctcagatcccttcaacttaggagaattgctgggactcagcgaacggcagggaggctcttggtggagagttctgggcccagagacttcctttcaggtaaagctctagctgcacacgaagctgccagccccaggggaggccctggatttctactgccaagtccctcagggttgcctttaactgtacccaaaccagaagtggcagaattgggcctgaggctgctgagtttctttaggcagcaatgttttgcaaaggcggcttcccttttctcatggcagcagatggagtttgtgcaaggtcagcgggctgaggtgctctggtcaaggctttgggaacagtgtctcctgacttgtcaagtcatccttcctcaggcaggcagcttgggcctctagagcagatccaggacaggcaattcatcccaatccctgctgtggtcgcagggcccttggtgggaggctgcgctgcccctccagagggcgagcttggagaggaacccagtctgaggggtggctgaggctcacggagcttctgggagctgcagatccccccagctggcagtggcttcctttttcttgtgatgcaggagttgtaagcctcctttgggactgccatgagacttcgggctatgaccagagagaaccatcctcgcgccgcaagccagaccagccacaagacctagtctgtgccctgacacagggagccccaaggggaagtagggaaggggacatcatcgcttcagtcctaatcctgtgcttcaggccttcgtcacagctgaacggcctccttagctgctagaagctggtctctgttgggtcccaggtgctgaggaaagcctttcaaaacttgggaggccccagcagggtggcaccacacaggccacacgagtcccagtgtgggggtgagagacacctcgtgagggtgggttagaaacctctttacaagcatttcaagatacatgcgtccttttttttttttttttttcttttcactatcatagtcactctggtgaatccaagcataaacagacaaatccaactacaactcaacagggtgcagatggggagggcagggcaacatctatgtatatgttcagctgctccagcagaacagacagcatggcttccagctgggactgggggaaaagaaccatttccaagggggtgtgttcccctttgtcgggtgtggagggctgatactatgcatgtggagctgagcagcgggctgggctgtctgggaggttggcagctacaagctagggtgcaagtgggggacagcgggactgtgggcctgccctgggtgccttgcccttccatcctggtgccaccactgacaaccaagacacccagcctgctgctgtgggctcagcacaggaaggggccaggccttctcaggggaaagggctctctccatgtcaacaaggcagaaacacctagggtcacagctgagcagtgccctggctcacatctgtgacgggaggaggagacagggaaccgaatcagatcatgagattcgtggtgagggtcccagttggatgagtggaactgagagtgagaggctggggtcccactcttgtgcctggactttgccttcccttaatttcaccctcagtatggagtaggtacctcctgcaaccaaccagggtcattactgagaaggggtggtgaggctgggaattcgggacattgtgacgtgtgatgaggggtataggcagtgattgggctctcacggcagacaacagcacagcggcgcagacggggtgactgcagtggccgtgggaaggacagggggctcgggacctgcctcccagacccccacacactccagagatgccagtggcccaggcttggaaacgggtggacgtctcccaagaggcacaagtccttacaaagagaactggttagccctaaagtcccaggtctgcaaagtggccaaaatcatggcagcagttccaaccttcagaactcaataaaacagggtttctgtggagcagagggaagcccctcaactcaggccccctaccctgcagggagggaggaagaggccagcgctctcaagacatcaaggtcagtcttttctaaggaggtcatccacgaagtgccaccctcctgccagcttgccttctctttttacccgctgtcccttctcccacaggctgccctgcagagggtggcacactgacccacagcaggcccccacccccggccaccaaggacaggcggccgctcagacgctgcaggtggcataggccttggctctcccagcggcaaggagggggatgtctactctccagcacgtggcttcctctcccactcccacttcttgtgcttcctctcccctctgcccagcccctgcctcggcctcccccgtggcctcccgccccaccccaacccccgtcacactcacacaaggttgacatcgtctgcctgtggctccacgaacacaccaagtttcaaatcctttgttgctgccactgcctctgtgacacccccacaacagggccagaggtggttggcacccccagtcccttgaaatcccccagaagcagctttcagagcctctccttctccctcttctacatggagggggaagaaaaaagaatcaaaaggaattgcctgaggaaatgttggatgtggccatgtttttgaatgtttttttttaaatattttattactagcccacccatcaatttggaaagatgaaatttgctcttactcccatcactgattttgaagtcccgagccaaagccgagtgacaaaagcaggttaagtgattaaccaattaaccgaactgcgaggagcagctgggggcagagggcgggggccgggtcattattctttttttttccacactctctcattctctcctctccacaattattgaccgccccaggggcctgatcacaaaccctgcttggccagggaggcagacacctcgtcagctagcgtggcgagctggggcgagtctaccatgtcgatgctgccggtggaggagacattgctgagatgccgtggagacgtgtccccagacaccactggcgacttgtacacgatctccgccccgtggtctgtcttggctttggcgttctcgcggaaggtcagcttgtgggtttcaatctttttatttcctccgccagggacgtgggtgatattgtccagggacccaatcttcgactggactctgtccttgaagtcaagcttctcagattttacttccacctggccacctcctggtttatgatggatgttgcctaatgagccacacttggaggtcaccttgctcaggtcaactggtttgtagactatttgcacactgccgcctcccgggacgtgtttgatattatcctttgagccacacttggactggacgttgctaagatccagcttcttattaattatctgcaccttcccgcctcccggctggtgcttcaggttctcagtggagccgatcttggacttgacattcttcaggtctggcatgggcacgggggctgtctgcaggcggctcttggcggaagacggcgacttgggtggagtacggaccactgccaccttcttgggctcccgggtgggtggggttggaagggacggggtgcgggagcggctgccgggagtgcctggggagccggggctgctgtagccgctgcgatcccctgattttggaggttcaccagagctgggtggtgtctttggagcgggcggggtttttgctggaatcctggtggcgttggcctggcccttctggcctggaggggctgctccccgcggtgtggcgatcttcgttttaccatcagcccccttggcttttttgtcatcgcttccagtcccgtctttgcttttactgaccatgcgagcttgggtcacgtgaccagcagcttcgtcttccaggctgggggtgtctccaatgcctgcttcttcagctgtggttccttctgggatctccgtgtggggctgcgcggcagcctgcttgccgggagctccctcatccactaagggtgctgtcacatcttccgctgttggagtgctcttagcatcagaggtttcagagcccggttcctcagatccgtcctcagtgggggtctgcaggggagattctttcaggccagcgtccgtgtcaccctcttggtcttggtgcatggtgtagcccccctgatctttcctgtcccccaacccgtacgtcccagcgtgatcttccatcacttcgaactcctggcggggctcagccatcctggttcaaagttcacctgatagtcgacagaggcgaggacgggagaggacagcggaggaggagaaggtggctgtggtggcggcggcagaaggtgggcggtggcagcggcgctgctgttggtgccggagctggtgggtggcggtgactgc

SEQ ID NO: 5 - RNA, 5396 nt, Mus musculus
  source 1..5396: mol_type = mRNA
ccgccggcctccagaacgcgctttctcggccgcgcgcgctctcagtctccgccacccaccagctccagcaccagcagcagcgccgccgccaccgcccaccttctgccgccgccgccacaaccaccttctcctccgctgtcctcttctgtcctcgccttctgtcgattatcaggctttgaaccagtatggctgaccctcgccaggagtttgacacaatggaagaccatgctggagattacactctgctccaagaccaagaaggagacatggaccatggcttaaaagagtctcccccacagccccccgccgatgatggagcggaggaaccagggtcggagacctccgatgctaagagcactccaactgctgaagacgtgactgcgcccctagtggatgagagagctcccgacaagcaggccgctgcccagccccacacggagatcccagaaggaattacagccgaagaagcaggcatcggagacaccccgaaccaggaggaccaagccgctgggcatgtgactcaagctcgtgtggccagcaaagacaggacaggaaatgacgagaagaaagccaagggcgctgatggcaaaaccggggcgaagatcgccacacctcggggagcagcctctccggcccagaagggcacgtccaacgccaccaggatcccggccaagaccacgcccagccctaagactcctccagggtcaggtgaaccaccaaaatccggagaacgaagcggctacagcagccccggctctcccggaacgcctggcagtcgctcgcgcaccccatccctaccaacaccgcccacccgggagcccaagaaggtggcagtggtccgcactccccctaagtcaccatcagctagtaagagccgcctgcagactgcccctgtgcccatgccagacctaaagaatgtcaggtcgaagattggctctactgagaacctgaagcaccagccaggaggtggcaaggtgcagataattaataagaagctggatcttagcaacgtccagtccaagtgtggctcgaaggataatatcaaacacgtcccgggtggaggcagtgtgcaaatagtctacaagccggtggacctgagcaaagtgacctccaagtgtggctcgttagggaacatccatcacaagccaggaggtggccaggtggaagtaaaatcagagaagctggacttcaaggacagagtccagtcgaagattggctccttggataatatcacccacgtccctggaggagggaataagaagattgaaacccacaagctgaccttcagggagaatgccaaagccaagacagaccatggagcagaaattgtgtataagtcacccgtggtgtctggggacacatctccacggcacctcagcaatgtgtcttccacgggcagcatcgacatggtggactcaccacagcttgccacactagccgatgaagtgtctgcttccttggccaagcagggtttgtgatcaggctcccagggcagtcaataatcatggagagaagagagagtgagagtgtggaaaaaaaaaaaaaaaaagaatgatctggccccttgccctctgccctccccgctgctcctcatagacaggctgacctgcttgtcacctaacctgcttttgtggctcggatttggctcgggacttcaaaatcagtgatgggaaaagtacatttcatctttccaaattgatttgtgggctaaaaataaaacatatttaagggaaaaaaaaacatgtaaaaacatggccaaaaaatttccttgggcaattgctaattgatttcccccccctgaccccgccctccctctctgagtattagagggtgaagaaggctctggaggctgcttctggggagtggctgagggactagggcagctaattgcccatagccccatcctaggggcttcagggacagtggcagcaatgagagatttgagacttggtgtgttcgtggggccgtaggcaggtgctgttaacttgtgtgggtgtgagtggggactgaaacagcgacagcgaaggctgagagatggatgggtggactgagttagaggacagaggtgaggaaggcaggttgggagaggggacactggctccttgccaagtagcttggggaggacagggtgctgcagctgcctgcagcagtcctagctagctcagatgcctgcttgataaagcactgtgggggtaacgtgggtgtgtgtgccccttctgcagggcagcctgtgggagaaggggtattgggcagaaggaaggtaagccagcaggtggtaccttgtagattggttctcttgaaggctgctcttgacatcccagggcactggcttcttcctccctccccgcaaggtgggaggtcctgagcgaggtgtttcccttcgctcccacaggaaaagctgctttactgagttctcaagtttggaactacagccatgatttggccaccattacagacctgggactttagggctaaccagatctttgtaaggacttgtgcctcttgggggacctctgcctgttctcatgcttggccctctggcacttctgtagtgggagggatggggggtggtattctgggatgtgggtcccaggcctcccatccctcacacagccactgtatcccctctctctgtcctatcatgcccacgtctgccacgagagctagtcactgccgtccgtacatcacgtctcactgtcctgagtgccatgcctctcccagcccccatccctggcccctgggtagatatgggcaatatctgctctacactaggggttggagtccagggaaggcaaagatttgggcctcagtctctagtcctacgttccacgaatccaaccagtgtgcctcccacaaggaaccttacgaccttgtttggttcactccattacttcctatcctggatgggaactggtgtgtgcctgcctggggatgaccttggacctctgccttttcttttatctaagtggatgcctcctaggcctgactccttgtgttgagctggaggcagccaagtcaggtgccaatgtcttggcatcagtaagaacagtcaagagtcccagggcagggccacacttctcccatctttcgcttccaccccagcttgtgatcgctagcctcccagagctcagctgccattaagtccccatgcacgtaatcagtctccacaccccagtttggggaacatacccccttgattgaagtgtttttttcctccggtcccatggaaaccatgctgcctgccctgctggagcagacggccacctccatagatgcagccctttctttcccgtcttcgccctgttacgttgtagttggatttgtctgtttgtctgggttcaccagagtgactatgatagtgaaaagaaaagaaagaaaaagaaaaaaaaaaaaaaaaagaaaaagaaaaaggaaaaaaaaaaggacgcatgtatcttgaaatatttgtcaaaaggttctagcccaccacgtgatggagagtctggatatctccttcctgacgtggctccaggccagtgcagtgctaacctgctgggacatcccatgttttgaagggtttcttctgcatctgggacctcacagacactggattgtgacattggaggtctgtgacattggaggtcaatggcattggccaaggcctgaagcacaggaccagctagaggcagcaggctccgagtgccagggagagcttgtggctggcctgttttgtatgaagatggtcctttctgatcacgacttcaaatcccacagtagccctgaaagacatctaagaactcctgcatcacaagagaaaaggacaccagtaccagcagggagagctgtgaccctagaaattccatgacgacccagtagatatccttgggccctctccaagcctgggccttttcaccatagagtttgggatggactgtcccactgatgaaggggacatcttaggagactcccttggtttccaagctgtcagccccctgaacttgcacgacctcctacagcttcagggactaggcctttgaagattaggaacctcaggcccacatcagccacttctgatgtacagttaaggacaatgtggagactaggaggaagcagccagcctttcccattaaagaactcttgagtgcccagggctacctattgtgagcttccccactgataagactttagctgtccatagaagtgagtccgagggaggaaaagtgtggtttcttcatcatggttacctgtcgtggttctctctcttacacccatttacccatcccgcagttcctgtccttgaatggggggtggggtgctctgcctatctcttgtggggtgatcagcccaaaaatcatgatttggagtgatctgatcagtgctgataggcagtttacaaagggattctggcttgtgacttcagtgaggacaatcccccagggccctttctttccatgcctctccaactcagagccaatgtctttgggtgggctagatagatagggcatacaattggcctggttcctccaagctcttaattcactttatcaatagttccatttaaattgacttcaatgataagagtgtatcccatttgagattgcttgcgttgtgggggagggggaggaggaacacattaagataattcacatgggcaaagggaggtcttggagtgtagccgttaagccatcttgtaaccccattcatgattttgaccacctgctagagagaagaggtgccaagagactagaacttggaggcttggctgtcccactaataggctttcgcaaggcagaggtagccagctaggtccctgccttcccagccaggtacagctctcaggtttgtggaggtaatctgtgaacttctcttcctgctgccttcttgtgatgtccagagcccacagtcaaatacctcctaagaaccctggcttccttccctctaatccactggcacatgactatcacctctggattgacctcagatccatagcctacacactgctagcagtggccaagatcacttcctttatctccatctgttctgttctccaggaaagtaagtggggatgagggtggaggtggtaatcaactgtagatctgtggctttatgagccttcagacttctctctggcttcttctggaagggttactattggcagtattgcaatctcaccctcctgatgaactgtagcctgtgccgttactgtgctgggcatgatctccagtgcttgcaagtcccatgatttctttggtgattttgagggtggggggagggacacaaatcagcttagcttagcttcctgtctgtgaatgtccatatagtgtattgtgttttaacaaatgatctacactgactgttgctgtaaaagtgaatttggaaataaagttattactctgaataaaaaaaaaaaaaaaaaa

SEQ ID NO: 6 - RNA, 5396 nt, Mus musculus
  source 1..5396: mol_type = other RNA
ttttttttttttttttttattcagagtaataactttatttccaaattcacttttacagcaacagtcagtgtagatcatttgttaaaacacaatacactatatggacattcacagacaggaagctaagctaagctgatttgtgtccctccccccaccctcaaaatcaccaaagaaatcatgggacttgcaagcactggagatcatgcccagcacagtaacggcacaggctacagttcatcaggagggtgagattgcaatactgccaatagtaacccttccagaagaagccagagagaagtctgaaggctcataaagccacagatctacagttgattaccacctccaccctcatccccacttactttcctggagaacagaacagatggagataaaggaagtgatcttggccactgctagcagtgtgtaggctatggatctgaggtcaatccagaggtgatagtcatgtgccagtggattagagggaaggaagccagggttcttaggaggtatttgactgtgggctctggacatcacaagaaggcagcaggaagagaagttcacagattacctccacaaacctgagagctgtacctggctgggaaggcagggacctagctggctacctctgccttgcgaaagcctattagtgggacagccaagcctccaagttctagtctcttggcacctcttctctctagcaggtggtcaaaatcatgaatggggttacaagatggcttaacggctacactccaagacctccctttgcccatgtgaattatcttaatgtgttcctcctccccctcccccacaacgcaagcaatctcaaatgggatacactcttatcattgaagtcaatttaaatggaactattgataaagtgaattaagagcttggaggaaccaggccaattgtatgccctatctatctagcccacccaaagacattggctctgagttggagaggcatggaaagaaagggccctgggggattgtcctcactgaagtcacaagccagaatccctttgtaaactgcctatcagcactgatcagatcactccaaatcatgatttttgggctgatcaccccacaagagataggcagagcaccccaccccccattcaaggacaggaactgcgggatgggtaaatgggtgtaagagagagaaccacgacaggtaaccatgatgaagaaaccacacttttcctccctcggactcacttctatggacagctaaagtcttatcagtggggaagctcacaataggtagccctgggcactcaagagttctttaatgggaaaggctggctgcttcctcctagtctccacattgtccttaactgtacatcagaagtggctgatgtgggcctgaggttcctaatcttcaaaggcctagtccctgaagctgtaggaggtcgtgcaagttcagggggctgacagcttggaaaccaagggagtctcctaagatgtccccttcatcagtgggacagtccatcccaaactctatggtgaaaaggcccaggcttggagagggcccaaggatatctactgggtcgtcatggaatttctagggtcacagctctccctgctggtactggtgtccttttctcttgtgatgcaggagttcttagatgtctttcagggctactgtgggatttgaagtcgtgatcagaaaggaccatcttcatacaaaacaggccagccacaagctctccctggcactcggagcctgctgcctctagctggtcctgtgcttcaggccttggccaatgccattgacctccaatgtcacagacctccaatgtcacaatccagtgtctgtgaggtcccagatgcagaagaaacccttcaaaacatgggatgtcccagcaggttagcactgcactggcctggagccacgtcaggaaggagatatccagactctccatcacgtggtgggctagaaccttttgacaaatatttcaagatacatgcgtccttttttttttcctttttctttttctttttttttttttttttctttttctttcttttcttttcactatcatagtcactctggtgaacccagacaaacagacaaatccaactacaacgtaacagggcgaagacgggaaagaaagggctgcatctatggaggtggccgtctgctccagcagggcaggcagcatggtttccatgggaccggaggaaaaaaacacttcaatcaagggggtatgttccccaaactggggtgtggagactgattacgtgcatggggacttaatggcagctgagctctgggaggctagcgatcacaagctggggtggaagcgaaagatgggagaagtgtggccctgccctgggactcttgactgttcttactgatgccaagacattggcacctgacttggctgcctccagctcaacacaaggagtcaggcctaggaggcatccacttagataaaagaaaaggcagaggtccaaggtcatccccaggcaggcacacaccagttcccatccaggataggaagtaatggagtgaaccaaacaaggtcgtaaggttccttgtgggaggcacactggttggattcgtggaacgtaggactagagactgaggcccaaatctttgccttccctggactccaacccctagtgtagagcagatattgcccatatctacccaggggccagggatgggggctgggagaggcatggcactcaggacagtgagacgtgatgtacggacggcagtgactagctctcgtggcagacgtgggcatgataggacagagagaggggatacagtggctgtgtgagggatgggaggcctgggacccacatcccagaataccaccccccatccctcccactacagaagtgccagagggccaagcatgagaacaggcagaggtcccccaagaggcacaagtccttacaaagatctggttagccctaaagtcccaggtctgtaatggtggccaaatcatggctgtagttccaaacttgagaactcagtaaagcagcttttcctgtgggagcgaagggaaacacctcgctcaggacctcccaccttgcggggagggaggaagaagccagtgccctgggatgtcaagagcagccttcaagagaaccaatctacaaggtaccacctgctggcttaccttccttctgcccaataccccttctcccacaggctgccctgcagaaggggcacacacacccacgttacccccacagtgctttatcaagcaggcatctgagctagctaggactgctgcaggcagctgcagcaccctgtcctccccaagctacttggcaaggagccagtgtcccctctcccaacctgccttcctcacctctgtcctctaactcagtccacccatccatctctcagccttcgctgtcgctgtttcagtccccactcacacccacacaagttaacagcacctgcctacggccccacgaacacaccaagtctcaaatctctcattgctgccactgtccctgaagcccctaggatggggctatgggcaattagctgccctagtccctcagccactccccagaagcagcctccagagccttcttcaccctctaatactcagagagggagggcggggtcaggggggggaaatcaattagcaattgcccaaggaaattttttggccatgtttttacatgtttttttttcccttaaatatgttttatttttagcccacaaatcaatttggaaagatgaaatgtacttttcccatcactgattttgaagtcccgagccaaatccgagccacaaaagcaggttaggtgacaagcaggtcagcctgtctatgaggagcagcggggagggcagagggcaaggggccagatcattctttttttttttttttttccacactctcactctctcttctctccatgattattgactgccctgggagcctgatcacaaaccctgcttggccaaggaagcagacacttcatcggctagtgtggcaagctgtggtgagtccaccatgtcgatgctgcccgtggaagacacattgctgaggtgccgtggagatgtgtccccagacaccacgggtgacttatacacaatttctgctccatggtctgtcttggctttggcattctccctgaaggtcagcttgtgggtttcaatcttcttattccctcctccagggacgtgggtgatattatccaaggagccaatcttcgactggactctgtccttgaagtccagcttctctgattttacttccacctggccacctcctggcttgtgatggatgttccctaacgagccacacttggaggtcactttgctcaggtccaccggcttgtagactatttgcacactgcctccacccgggacgtgtttgatattatccttcgagccacacttggactggacgttgctaagatccagcttcttattaattatctgcaccttgccacctcctggctggtgcttcaggttctcagtagagccaatcttcgacctgacattctttaggtctggcatgggcacaggggcagtctgcaggcggctcttactagctgatggtgacttagggggagtgcggaccactgccaccttcttgggctcccgggtgggcggtgttggtagggatggggtgcgcgagcgactgccaggcgttccgggagagccggggctgctgtagccgcttcgttctccggattttggtggttcacctgaccctggaggagtcttagggctgggcgtggtcttggccgggatcctggtggcgttggacgtgcccttctgggccggagaggctgctccccgaggtgtggcgatcttcgccccggttttgccatcagcgcccttggctttcttctcgtcatttcctgtcctgtctttgctggccacacgagcttgagtcacatgcccagcggcttggtcctcctggttcggggtgtctccgatgcctgcttcttcggctgtaattccttctgggatctccgtgtggggctgggcagcggcctgcttgtcgggagctctctcatccactaggggcgcagtcacgtcttcagcagttggagtgctcttagcatcggaggtctccgaccctggttcctccgctccatcatcggcggggggctgtgggggagactcttttaagccatggtccatgtctccttcttggtcttggagcagagtgtaatctccagcatggtcttccattgtgtcaaactcctggcgagggtcagccatactggttcaaagcctgataatcgacagaaggcgaggacagaagaggacagcggaggagaaggtggttgtggcggcggcggcagaaggtgggcggtggcggcggcgctgctgctggtgctggagctggtgggtggcggagactgagagcgcgcgcggccgagaaagcgcgttctggaggccggcgg

SEQ ID NO: 7 - RNA, 5790 nt, Macaca fascicularis
  source 1..5790: mol_type = mRNA
gccgagcggcagggcgctcgcgcgcgcccactggtggccggaggagaaggctcccgcggaggccgggctgcccgccccctcccctggggaggctcgcgctcccgctgctcgcgcctgcgccgcctgccggcctcgggaacgcgccctcttccccggcgcgcgccctcgcagtcaccgccacccaccagctccggcaccaacagcagcgccgctgccaccgcccaccttctgccgccgccaccacagccaccttctcctcctccgctgtcctctcccgtcctcgcctctgtcgactatcaggcgagccttgaaccaggatggctgagccccgccaggagttcgatgtgatggaagatcacgctgggacgtacgggttgggggacaggaaagatcaagagggctacaccatgctccaagaccaagagggtgacacggacgctggcctgaaagaatctcccctgcagacccccgctgaggatggatctgaggaactgggctctgaaacctctgatgctaagagcactccaacggcggaagatgtgacagcgcccttagtggatgagagagctcccggcgagcaggctgccgcccagccccacatggagatcccagaaggaaccacagctgaggaagcaggcatcggagacacccccagcctggaagacgaagctgctggtcacgtgacccaagctcgcatggtcagtaaaagcaaagacgggactggaagcgatgacaaaaaagccaagggggctgatgggaaaacgaagatcgccacaccccggggagcggcccctccaggccagaagggccaagccaacgccaccaggattccagcaaaaaccccgcccgccccaaagacaccacccagctctggtgaacctccaaaatcaggggatcgcagtggctacagcagccccggctccccgggcactcccggcagccgctcccgcaccccgtcccttccaacccctccagcccgggagcccaagaaggtggcggtggtccgtactccacctaagtcgccgtcttccgccaagagccgcctgcagacagcccccgtgcccatgccagacctgaagaacgtcaagtccaagatcggctccaccgagaacctgaagcaccagccgggaggcgggaaggtgcagataattaataagaagctggatcttagcaacgtccagtccaagtgtggctcaaaggataatatcaaacacgtcccgggaggcggcagtgtgcaaatagtctacaaaccagttgacctgagcaaggtgacctccaagtgtggctcattaggcaacatccatcataaaccaggaggtggccaggtggaagtaaaatctgagaagctggacttcaaggacagagtgcagtcgaagatcgggtccctggacaatatcacccatgtccctggcggaggaaataaaaagattgaaacccacaagctgaccttccgcgagaacgccaaagccaagacagaccacggggcggaaatcgtgtacaagtcgccggtggtgtctggggacacgtctccacggcacctcagcaatgtctcctccaccggcagcatcgacatggtagactcgccccagctcgccacgctagccgacgaggtgtctgcctccctggccaagcagggtttgtgatcaggcccccggggcggtcaataatcgtggagagaagagagagtgagagtgtggaaaaaaaaagaataatgacccggccccgccctctgcccccagctgctcctcgcagttcggttaatcggttcatcacttaaccggcttttatcgctcggctttggctcgggacttcaaaatcagtgatgggaataagagcaaattgcatctttccaaattgatcggtgggctaataataaaatattttttaaaaaacattcaaaaacatggccacacccaacatttcctcgggcaattccttttgattctttttttttccccctccatgtagaagagggagaaggagaggctgtgaaagctgcttcggggggatttcaagagactgggggtgcccaccgcctctggccctgtcgtgggggtgtcacagaggcagcggcagcaacaaaggatttgaaacttggtgtgttcgtggagccacaggcagacgatgtcaaccttgtgtgagtgtgacgggtgggggtggggcgggaggccatgggggaggccaaggcaggggctgggcagaggggagaggaaggacgagaagggggagtgggagaggaagccacatgctggagaggagatgccctcctccgcgccactgggagggccaaggcctccgccacctgcagtgtctcagactgagcggctgcctgtccttggtggccagggtctgctgcgagttgatgtgccaccctctgcagggcagcctgtgggagaaggggcggcgggtaagaagagaaggcaagctggcgggagggtggcaccccgtggatgacctccttggaaaagactgaccttgatgtcggagggcgctggcctcttcctccctccctgcagggtagggggcctgagccgaggggcttccctctgctccacagaaaccctgttttattgagttctgaaggttggaactgcagccatgattttggccactttgcagacctgggactttagggctaaccagttctctttgtaaggacttgtgcctcttgggagacgtccacccgtttccaagcctgggccaccggcatctctggagtgtgcaggggtctgggaggcgggtcccgagccccctgtccttcccacggccactgcagtcacccctgtctgccccactgtgctgtcgtctgccatgagaacccagtcactgcctatacccctcatcacgtcacaatgtccaaattcccagcctcaccaccccccttctcagtaaggaccctggttggctgtgggaggcacctactccatactgagggtgaaattaagggaaggtaaagtccaggcacaagagtgggaccccagcctctcactctcagttccactcatccaactgggtccctcaccacgaatctcacgacctgattcggttccctgcctcctcctcccatcacagatgtgagccagggcactgctcagctgtgaccctcggtgtttctgccttgttgacatagagagagccctttccccccgagaaggcctggccccttcctgtgctgagcccgcagcaggaggctgggtgtcctggttgtcggtgacggcaccaggatgggcgggcaaggcacccagggcaggcccacagtcccgctgtcccccacttgcaccccagcttgtggctgccagcctcccagacagcccagcccgctgctcagctccacatgcatagaatcagccctccacatcccaaaaaggggaacacacccccttcgaaatggttttctccccggtcccagctggaagccatgctgtctgttctgctggagcagctgaacatatacatagatgttgccctgccctccccatctgcaccctgttgcgttgtagttggatttgtctgtttatgcttggattcaccagagtgactatgatagtgaaaagaaaaaaaaaaaaaaaaaaaggacgcatgtatcttgaaatgcttgtaaagaggtttctaacccaccctcacaaggtgtctctcacccccacgctgggacgcgtgtggcctgtgtggcgccgccctgctggggcctcccaaggtttgaaaggctttcctcagcatccgggacccaacagagaccagattctagcatctaaggaggccgttcagctgtgaagaaggcctgaagcacaggattaggactgaagcgatgacatctccttccctacttccccttggggctctctgtgtcagggcagagagtaggtcttgtggctggtctggcttgcggcacgaggatggttctctctggtcacagcccgaagtcccacagcagtcctaaaggaggcttacaactcctgcatcacaagaagaaggaagccagtgccagctggggggatctgcagctcccagaagctccatgagcctcagccaccccgcagactgggttcctcgccaagctcgccctctggaggggcagccagcctcccaccaagggccctgcgaccacagcagggattgggatgaatggcctatcctggatctgctccagaggcccgagccacctgcctgaggaaggataagtcaggagacaccgttcccaaagccttgaccagagcacctcagcccactgaccttgcacaaactccatctgctgccatgagaaaagggaagccgcctttgcaaaaaattgctgcctaaagaaactcagcagcctcaggctcaattctgccgcttctggtttgggtacagttaaaggcaaccctgagggacttggcagtagaaatccagggcatcccctagggctggcaacttcgtgtgcagctagagctttccctgcaagaagtttctgggcccagaactctccaccaggaagctccctgctgttcgctaagtcccagcaattctctaagtgaagggatctgagaatgaggaggaaatgtggggtagagatttggtggtggttagagacatgcccccctcattactgccaacagtttcggctgcatttttcacgtacctcggttcctcttcctgaagttcttgtgccctgctcttcagcaccgtgggccttatccggtaggctctgggatctcccccttgtggggcaggctcttggggccagcctaagatcatggtttagggtgatcagtgctggcagataaattgcaaaggcacgctggcttgtgacctcaaatgacaatccccccagggctgggcactcctcccctcccctcacttctcccacctgcagagccagtgtccgtgggtgggctagataggatatactgtatgccggctccttcaagctgttgactcactttatcaatagttccatttaaattgacttcaatggtgagactgtatcctgtttgctattgcttattgtgctatggggggaggggggaggaatgtgtaacatagttaacatgggtaaagggagatcttggggtgcagcacttcaattgcctcgtaacccttttcatcatttcaaccacatttgctaaagggagggagcagccacgcggttagaggcccttggggtttctcttttccactgacagcctttcccaggcagctggccagttccccattccctccccagccaggtgcaggcgtagcaatatggacatctggttgctttggcctgctgccctctttcaggggtcctaagcccacaatcatgcctccctaagaccctggcatccttccttttaagccgttggcacctctgtgccacctctcacactggctccagacacagcctgtgcttctggcagctgagatcactcacttccccctcctcatctttgttggagctccaagtcaagccacgaggtcagggcgagggcagaggtggtcaccagcgtgtcccatctacagacctgtggcttcgtaagacttctgatttctcttcagctttgaaaagggttaccctgggcactggcctagagtctcacctcctaatagacttacccccatgagtttgccatgttgagcaggacaatttctggcacttgcaagtcccatgatttcttcggtaattgtgagggtggggggagggacatgaaatcatcttagcttagcttcctgtctgtgaatgtctatatagtgtattgtgtgttttaacaaatgatttacactgactgttgccgtaaaagtgaatttggaaataaagttattactctgattaaa

SEQ ID NO: 8 - RNA, 5790 nt, Macaca fascicularis
  source 1..5790: mol_type = other RNA
tttaatcagagtaataactttatttccaaattcacttttacggcaacagtcagtgtaaatcatttgttaaaacacacaatacactatatagacattcacagacaggaagctaagctaagatgatttcatgtccctccccccaccctcacaattaccgaagaaatcatgggacttgcaagtgccagaaattgtcctgctcaacatggcaaactcatgggggtaagtctattaggaggtgagactctaggccagtgcccagggtaacccttttcaaagctgaagagaaatcagaagtcttacgaagccacaggtctgtagatgggacacgctggtgaccacctctgccctcgccctgacctcgtggcttgacttggagctccaacaaagatgaggagggggaagtgagtgatctcagctgccagaagcacaggctgtgtctggagccagtgtgagaggtggcacagaggtgccaacggcttaaaaggaaggatgccagggtcttagggaggcatgattgtgggcttaggacccctgaaagagggcagcaggccaaagcaaccagatgtccatattgctacgcctgcacctggctggggagggaatggggaactggccagctgcctgggaaaggctgtcagtggaaaagagaaaccccaagggcctctaaccgcgtggctgctccctccctttagcaaatgtggttgaaatgatgaaaagggttacgaggcaattgaagtgctgcaccccaagatctccctttacccatgttaactatgttacacattcctcccccctccccccatagcacaataagcaatagcaaacaggatacagtctcaccattgaagtcaatttaaatggaactattgataaagtgagtcaacagcttgaaggagccggcatacagtatatcctatctagcccacccacggacactggctctgcaggtgggagaagtgaggggaggggaggagtgcccagccctggggggattgtcatttgaggtcacaagccagcgtgcctttgcaatttatctgccagcactgatcaccctaaaccatgatcttaggctggccccaagagcctgccccacaagggggagatcccagagcctaccggataaggcccacggtgctgaagagcagggcacaagaacttcaggaagaggaaccgaggtacgtgaaaaatgcagccgaaactgttggcagtaatgaggggggcatgtctctaaccaccaccaaatctctaccccacatttcctcctcattctcagatcccttcacttagagaattgctgggacttagcgaacagcagggagcttcctggtggagagttctgggcccagaaacttcttgcagggaaagctctagctgcacacgaagttgccagccctaggggatgccctggatttctactgccaagtccctcagggttgcctttaactgtacccaaaccagaagcggcagaattgagcctgaggctgctgagtttctttaggcagcaattttttgcaaaggcggcttcccttttctcatggcagcagatggagtttgtgcaaggtcagtgggctgaggtgctctggtcaaggctttgggaacggtgtctcctgacttatccttcctcaggcaggtggctcgggcctctggagcagatccaggataggccattcatcccaatccctgctgtggtcgcagggcccttggtgggaggctggctgcccctccagagggcgagcttggcgaggaacccagtctgcggggtggctgaggctcatggagcttctgggagctgcagatccccccagctggcactggcttccttcttcttgtgatgcaggagttgtaagcctcctttaggactgctgtgggacttcgggctgtgaccagagagaaccatcctcgtgccgcaagccagaccagccacaagacctactctctgccctgacacagagagccccaaggggaagtagggaaggagatgtcatcgcttcagtcctaatcctgtgcttcaggccttcttcacagctgaacggcctccttagatgctagaatctggtctctgttgggtcccggatgctgaggaaagcctttcaaaccttgggaggccccagcagggcggcgccacacaggccacacgcgtcccagcgtgggggtgagagacaccttgtgagggtgggttagaaacctctttacaagcatttcaagatacatgcgtcctttttttttttttttttttcttttcactatcatagtcactctggtgaatccaagcataaacagacaaatccaactacaacgcaacagggtgcagatggggagggcagggcaacatctatgtatatgttcagctgctccagcagaacagacagcatggcttccagctgggaccggggagaaaaccatttcgaagggggtgtgttcccctttttgggatgtggagggctgattctatgcatgtggagctgagcagcgggctgggctgtctgggaggctggcagccacaagctggggtgcaagtgggggacagcgggactgtgggcctgccctgggtgccttgcccgcccatcctggtgccgtcaccgacaaccaggacacccagcctcctgctgcgggctcagcacaggaaggggccaggccttctcggggggaaagggctctctctatgtcaacaaggcagaaacaccgagggtcacagctgagcagtgccctggctcacatctgtgatgggaggaggaggcagggaaccgaatcaggtcgtgagattcgtggtgagggacccagttggatgagtggaactgagagtgagaggctggggtcccactcttgtgcctggactttaccttcccttaatttcaccctcagtatggagtaggtgcctcccacagccaaccagggtccttactgagaaggggggtggtgaggctgggaatttggacattgtgacgtgatgaggggtataggcagtgactgggttctcatggcagacgacagcacagtggggcagacaggggtgactgcagtggccgtgggaaggacagggggctcgggacccgcctcccagacccctgcacactccagagatgccggtggcccaggcttggaaacgggtggacgtctcccaagaggcacaagtccttacaaagagaactggttagccctaaagtcccaggtctgcaaagtggccaaaatcatggctgcagttccaaccttcagaactcaataaaacagggtttctgtggagcagagggaagcccctcggctcaggccccctaccctgcagggagggaggaagaggccagcgccctccgacatcaaggtcagtcttttccaaggaggtcatccacggggtgccaccctcccgccagcttgccttctcttcttacccgccgccccttctcccacaggctgccctgcagagggtggcacatcaactcgcagcagaccctggccaccaaggacaggcagccgctcagtctgagacactgcaggtggcggaggccttggccctcccagtggcgcggaggagggcatctcctctccagcatgtggcttcctctcccactcccccttctcgtccttcctctcccctctgcccagcccctgccttggcctcccccatggcctcccgccccacccccacccgtcacactcacacaaggttgacatcgtctgcctgtggctccacgaacacaccaagtttcaaatcctttgttgctgccgctgcctctgtgacacccccacgacagggccagaggcggtgggcacccccagtctcttgaaatccccccgaagcagctttcacagcctctccttctccctcttctacatggagggggaaaaaaaaagaatcaaaaggaattgcccgaggaaatgttgggtgtggccatgtttttgaatgttttttaaaaaatattttattattagcccaccgatcaatttggaaagatgcaatttgctcttattcccatcactgattttgaagtcccgagccaaagccgagcgataaaagccggttaagtgatgaaccgattaaccgaactgcgaggagcagctgggggcagagggcggggccgggtcattattctttttttttccacactctcactctctcttctctccacgattattgaccgccccgggggcctgatcacaaaccctgcttggccagggaggcagacacctcgtcggctagcgtggcgagctggggcgagtctaccatgtcgatgctgccggtggaggagacattgctgaggtgccgtggagacgtgtccccagacaccaccggcgacttgtacacgatttccgccccgtggtctgtcttggctttggcgttctcgcggaaggtcagcttgtgggtttcaatctttttatttcctccgccagggacatgggtgatattgtccagggacccgatcttcgactgcactctgtccttgaagtccagcttctcagattttacttccacctggccacctcctggtttatgatggatgttgcctaatgagccacacttggaggtcaccttgctcaggtcaactggtttgtagactatttgcacactgccgcctcccgggacgtgtttgatattatcctttgagccacacttggactggacgttgctaagatccagcttcttattaattatctgcaccttcccgcctcccggctggtgcttcaggttctcggtggagccgatcttggacttgacgttcttcaggtctggcatgggcacgggggctgtctgcaggcggctcttggcggaagacggcgacttaggtggagtacggaccaccgccaccttcttgggctcccgggctggaggggttggaagggacggggtgcgggagcggctgccgggagtgcccggggagccggggctgctgtagccactgcgatcccctgattttggaggttcaccagagctgggtggtgtctttggggcgggcggggtttttgctggaatcctggtggcgttggcttggcccttctggcctggaggggccgctccccggggtgtggcgatcttcgttttcccatcagcccccttggcttttttgtcatcgcttccagtcccgtctttgcttttactgaccatgcgagcttgggtcacgtgaccagcagcttcgtcttccaggctgggggtgtctccgatgcctgcttcctcagctgtggttccttctgggatctccatgtggggctgggcggcagcctgctcgccgggagctctctcatccactaagggcgctgtcacatcttccgccgttggagtgctcttagcatcagaggtttcagagcccagttcctcagatccatcctcagcgggggtctgcaggggagattctttcaggccagcgtccgtgtcaccctcttggtcttggagcatggtgtagccctcttgatctttcctgtcccccaacccgtacgtcccagcgtgatcttccatcacatcgaactcctggcggggctcagccatcctggttcaaggctcgcctgatagtcgacagaggcgaggacgggagaggacagcggaggaggagaaggtggctgtggtggcggcggcagaaggtgggcggtggcagcggcgctgctgttggtgccggagctggtgggtggcggtgactgcgagggcgcgcgccggggaagagggcgcgttcccgaggccggcaggcggcgcaggcgcgagcagcgggagcgcgagcctccccaggggagggggcgggcagcccggcctccgcgggagccttctcctccggccaccagtgggcgcgcgcgagcgccctgccgctcggc

SEQ ID NO: 9 - RNA, 5272 nt, Rattus norvegicus
  source 1..5272: mol_type = mRNA
accgcccaccttctgctgtcgccgccgccacaaccaccttcccctccgctgtcctcttctgtcctcgcctcctgtcgattatcaggctttgaagcagcatggctgaaccccgccaggagtttgacacaatggaagaccaggccggagattacactatgctccaagaccaagaaggagacatggaccatggcttaaaagagtctcccccacagcccccagccgatgatggatcagaagaaccagggtcggagacctctgatgctaagagcactccaactgctgaagacgtgactgcgcccctagtggaagagagagctcccgacaagcaggcgactgcccagtcccacacggagatcccagaaggcaccacagctgaagaagcaggcatcggagacaccccgaacatggaggaccaagctgctgggcatgtgactcaagctcgagtggccggcgtaagcaaagacaggacaggaaatgacgagaagaaagccaagggcgccgatggcaaaacgggggcgaagatcgccacacctcggggagcagccactccgggccagaaaggcacatccaatgccaccaggatcccagccaagaccacacccagcccaaagactcctccaggatcaggtgaaccaccaaaatccggagaacgaagcggctacagcagccccggctcgcccggaacccctggcagtcgctcccgtaccccatccctaccaacgccgcccacccgagagcccaaaaaggtggcagtggttcgcactccccctaagtcaccgtctgccagtaagagccgcctacagactgcccctgtgcccatgccagacctaaagaacgtcaggtccaagattggctccactgagaacctgaagcaccagccgggaggcggcaaggtgcagataattaataagaagctggatcttagcaacgtccagtccaagtgtggctcaaaggacaatatcaaacacgtcccgggcggaggcagtgtgcaaatagtctacaagccagtggacctgagcaaggtgacctccaagtgtggttccttagggaacatccatcacaagccaggaggtggccaggtagaagtaaaatcagagaagctggacttcaaggatagagtccagtcgaagattggctccttggataacatcacccatgtccctggaggagggaataagaagattgaaacccacaagctgaccttcagggagaatgccaaagccaagacagaccatggagcagaaatcgtgtacaagtcacctgtggtgtctggggacacatctccacggcacctcagcaacgtctcctccacgggcagcatcgacatggtggactctccacagcttgccacgttagccgatgaagtgtccgcctctttggccaagcagggtttgtgatcaggcccctggggccgtcactgatcatggagagaagagagagtgagagtgtggaaaaaaaaaaaaaaaaaagaatgacctggcccctcaccctctgccctccccgctgctcctcatagacaggctgaccagcttgtcacctaacctgcttttgtggctcgggtttggctcgggacttcaaaatcagtgatgggaaaaagtaaatttcatctttccaaattgatttgtgggctagtaataaaatatttttaaggaaggaaaaaaaaaaaaacacgtaaaaccatggccaaacaaaacccaacatttccttggcaattgttattgaccccgccccccccctctgagttttagagggtgaaggaggctttggatggaggctgcttctggggattggctgagggactagggcaactaattgcccacagccccatcttaggggcatcagggacagcggcagcaatgaaagacttgggacttggtgtgtttgtggagccgtaggcaggtgatgttaactttgtgtgggtttgagggaggactgtgatagtgaaggctgagagatgggtgggctgggagtcagaggagagaggtgaggaagacaggttgggagaggggacattggctccttgccaaggagcttgggaagcacaggtagccctggctgcctgcagcagtcttagctagcacagatgcctgcctgagaaagcacagtggggtacagtgggtgtgtgtgccccttctgaagggcagcccatgggagaaggggtattgggcagaaggaaggtaggccagaaggtggcaccttgtagattggttctctgaaggctgaccttgccatcccagggcactggctcccaccctccagggagggaggtcctgagctgaggagcttccctttgctctcacaggaaaacctgtgttactgagttctgaagtttggaactacagccatgattttggccaccatacagacctgggactttagggctaaccagttctttgtaaggacttgtgcctcttgcgggaacatctgcctgttctcaagcctggtcctctggcacttctgcagtgtgagggatgggggtggtaattctgggatgtgggtcccaggcctcccatcctcgcacagccactgtatcccctctacctgtcctatcatgcccacgtctgccatgagagccagtcactgccgtccgtacatcacgtctcaccgtcctgagtgcccagcctccccaagccccatccctggcccctgggtagttatggccaatatctgctctacactaggggttggagtccagggaaggcaaagatttgggccttggtctctagtcctacgttgcacgaatccaaccagtgtgcctcccacaaggaaccttacaaccttgtttggtttgctccatcatttcccatcgtggatgggagtccgtgtgtgcctggagattaccctggacacctctgcttttttttttttactttagcggttgcctcctaggcctgactccttcccatgttgaactggaggcagccacgttaggtgtcaatgtcctggcatcagtatgaacagtcagtagtcccagggcagggccacacttctcccatcttctgcttccaccccagcttgtgattgctagcctcccagagctcagccgccattaagtccccatgcacgtaatcagcccttcataccccaatttggggaacataccccttgattgaaatgttttccctccagtcctatggaagcggtgctgcctgccctgctggagcagccagccatctccagagacgcagccctttctctcctgtccgcaccctgttgcgctgtagtcggattcgtctgtttgtctgggttcaccagagtgactatgatagtgaaaagaaaaagaaaaagaaaaaagaaaaaagaaaaaaaaaaaaggacgcatgttatcttgaaatatttgtcaaaaggttgtagcccaccgcagggattggagggcctggatattccttgtcttcttcgtgacttaggtccaggccggtgcagtgctaccctgctgggacatcccatgttttgaagggtttcttcttcatctgggaccctgcagacactggattgtgacattggaggtctatgacattggccaaggcctgaagcacaggacccgttagaggcagcaggctccgactgtcagggagagcttgtggctggcctgtttctctgagtgaagatggtcctctctaatcacaacttcaagtcccacagcagccctggcagacatctaagaactcctgcatcacaagagaaaaggacactagtaccagcagggagagctgtggccctagaaattccatgactctccactacatatccgtgggtcctttccaagccttggcctcgtcaccaagggcttgggatggactgccccactgatgaaagggacatctttggagacccccttggtttccaaggcgtcagccccctgaccttgcatgacctcctacagctgtaaggatgaggcctttaaagattaggaacctcaggcccaggtcggccactttgggcttgggtacagttagggacgatgcggtagaaggaggtggccaacctttcccatataagagttctgtgtgcccagagctaccctattgtgagctccccactgctgatggactttagctgtccttagaagtgaagagtccaacggaggaaaaggaagtgtggtttgatggtctgtggtcccttcatcatggttacctgttgtggttttctctcgtatacccatttacccatcctgcagttcctgtccttgaataggggtgggggtactctgccatatctcttgtagggcagtcagcccccaagtcatagtttggagtgatctggtcagtgctaataggcagtttacaaaggaattctggcttgttacttcagtgaggacaatcccccaagggccctggcacctgtcctgtctttccatggctctccactgcagagccaatgtctttgggtgggctagatagggtgtacaatttgcctggttcctccaagctcttaatccactttatcaatagttccatttaaattgacttcaatgataagagtgtatcccatttgagattgcttgtgttgtggggtaaaggggggaggaggaacatgttaagataattgacatgggcaaggggaagtcttgaagtgtagcagttaaaccatcttgtagccccattcatgatgttgaccacttgctagagagaagaggtgccataaggctagaacctagaggcttggctgtcccaccaacaggcaggcttttgcaaggcagaggcagccagctaggtccctgacttcccagccaggtgcagctctaagaactgctcttgcctgctgccttcttgtggtgtccagagcccacagccaatgcctcctcaaaaccctggcttccttccttctaatccactggcacatcagcatcacctccggattgacttcagatccacagcctacactactagcagtgggtaagaccacttcctttgtccttgtctgttctccagaaaagtgggcatggaggcggtgttaataactataggtctgtggctttatgagccttcaaacttctctctagcttctgaaagggttacttttgggcagtattgcagtctcaccctcccgatgggctgtagcctgtgcagttgctgtactgggcatgatctccagtgcttgcaagtcccatgatttctttggtgattttgagggtggggggagggacatgaatcatcttagcttagcttcctgtctgtgaatgtccatatagtgtactgtgttttaacaaacgatttacactgactgttgctgtacaagtgaatttggaaataaagttattactctgattaaa

SEQ ID NO: 10 - RNA, 5272 nt, Rattus norvegicus
  source 1..5272: mol_type = other RNA
tttaatcagagtaataactttatttccaaattcacttgtacagcaacagtcagtgtaaatcgtttgttaaaacacagtacactatatggacattcacagacaggaagctaagctaagatgattcatgtccctccccccaccctcaaaatcaccaaagaaatcatgggacttgcaagcactggagatcatgcccagtacagcaactgcacaggctacagcccatcgggagggtgagactgcaatactgcccaaaagtaaccctttcagaagctagagagaagtttgaaggctcataaagccacagacctatagttattaacaccgcctccatgcccacttttctggagaacagacaaggacaaaggaagtggtcttacccactgctagtagtgtaggctgtggatctgaagtcaatccggaggtgatgctgatgtgccagtggattagaaggaaggaagccagggttttgaggaggcattggctgtgggctctggacaccacaagaaggcagcaggcaagagcagttcttagagctgcacctggctgggaagtcagggacctagctggctgcctctgccttgcaaaagcctgcctgttggtgggacagccaagcctctaggttctagccttatggcacctcttctctctagcaagtggtcaacatcatgaatggggctacaagatggtttaactgctacacttcaagacttccccttgcccatgtcaattatcttaacatgttcctcctcccccctttaccccacaacacaagcaatctcaaatgggatacactcttatcattgaagtcaatttaaatggaactattgataaagtggattaagagcttggaggaaccaggcaaattgtacaccctatctagcccacccaaagacattggctctgcagtggagagccatggaaagacaggacaggtgccagggcccttgggggattgtcctcactgaagtaacaagccagaattcctttgtaaactgcctattagcactgaccagatcactccaaactatgacttgggggctgactgccctacaagagatatggcagagtacccccacccctattcaaggacaggaactgcaggatgggtaaatgggtatacgagagaaaaccacaacaggtaaccatgatgaagggaccacagaccatcaaaccacacttccttttcctccgttggactcttcacttctaaggacagctaaagtccatcagcagtggggagctcacaatagggtagctctgggcacacagaactcttatatgggaaaggttggccacctccttctaccgcatcgtccctaactgtacccaagcccaaagtggccgacctgggcctgaggttcctaatctttaaaggcctcatccttacagctgtaggaggtcatgcaaggtcagggggctgacgccttggaaaccaagggggtctccaaagatgtccctttcatcagtggggcagtccatcccaagcccttggtgacgaggccaaggcttggaaaggacccacggatatgtagtggagagtcatggaatttctagggccacagctctccctgctggtactagtgtccttttctcttgtgatgcaggagttcttagatgtctgccagggctgctgtgggacttgaagttgtgattagagaggaccatcttcactcagagaaacaggccagccacaagctctccctgacagtcggagcctgctgcctctaacgggtcctgtgcttcaggccttggccaatgtcatagacctccaatgtcacaatccagtgtctgcagggtcccagatgaagaagaaacccttcaaaacatgggatgtcccagcagggtagcactgcaccggcctggacctaagtcacgaagaagacaaggaatatccaggccctccaatccctgcggtgggctacaaccttttgacaaatatttcaagataacatgcgtccttttttttttttcttttttcttttttctttttctttttcttttcactatcatagtcactctggtgaacccagacaaacagacgaatccgactacagcgcaacagggtgcggacaggagagaaagggctgcgtctctggagatggctggctgctccagcagggcaggcagcaccgcttccataggactggagggaaaacatttcaatcaaggggtatgttccccaaattggggtatgaagggctgattacgtgcatggggacttaatggcggctgagctctgggaggctagcaatcacaagctggggtggaagcagaagatgggagaagtgtggccctgccctgggactactgactgttcatactgatgccaggacattgacacctaacgtggctgcctccagttcaacatgggaaggagtcaggcctaggaggcaaccgctaaagtaaaaaaaaaaaagcagaggtgtccagggtaatctccaggcacacacggactcccatccacgatgggaaatgatggagcaaaccaaacaaggttgtaaggttccttgtgggaggcacactggttggattcgtgcaacgtaggactagagaccaaggcccaaatctttgccttccctggactccaacccctagtgtagagcagatattggccataactacccaggggccagggatggggcttggggaggctgggcactcaggacggtgagacgtgatgtacggacggcagtgactggctctcatggcagacgtgggcatgataggacaggtagaggggatacagtggctgtgcgaggatgggaggcctgggacccacatcccagaattaccacccccatccctcacactgcagaagtgccagaggaccaggcttgagaacaggcagatgttcccgcaagaggcacaagtccttacaaagaactggttagccctaaagtcccaggtctgtatggtggccaaaatcatggctgtagttccaaacttcagaactcagtaacacaggttttcctgtgagagcaaagggaagctcctcagctcaggacctccctccctggagggtgggagccagtgccctgggatggcaaggtcagccttcagagaaccaatctacaaggtgccaccttctggcctaccttccttctgcccaataccccttctcccatgggctgcccttcagaaggggcacacacacccactgtaccccactgtgctttctcaggcaggcatctgtgctagctaagactgctgcaggcagccagggctacctgtgcttcccaagctccttggcaaggagccaatgtcccctctcccaacctgtcttcctcacctctctcctctgactcccagcccacccatctctcagccttcactatcacagtcctccctcaaacccacacaaagttaacatcacctgcctacggctccacaaacacaccaagtcccaagtctttcattgctgccgctgtccctgatgcccctaagatggggctgtgggcaattagttgccctagtccctcagccaatccccagaagcagcctccatccaaagcctccttcaccctctaaaactcagagggggggggcggggtcaataacaattgccaaggaaatgttgggttttgtttggccatggttttacgtgtttttttttttttccttccttaaaaatattttattactagcccacaaatcaatttggaaagatgaaatttactttttcccatcactgattttgaagtcccgagccaaacccgagccacaaaagcaggttaggtgacaagctggtcagcctgtctatgaggagcagcggggagggcagagggtgaggggccaggtcattcttttttttttttttttttccacactctcactctctcttctctccatgatcagtgacggccccaggggcctgatcacaaaccctgcttggccaaagaggcggacacttcatcggctaacgtggcaagctgtggagagtccaccatgtcgatgctgcccgtggaggagacgttgctgaggtgccgtggagatgtgtccccagacaccacaggtgacttgtacacgatttctgctccatggtctgtcttggctttggcattctccctgaaggtcagcttgtgggtttcaatcttcttattccctcctccagggacatgggtgatgttatccaaggagccaatcttcgactggactctatccttgaagtccagcttctctgattttacttctacctggccacctcctggcttgtgatggatgttccctaaggaaccacacttggaggtcaccttgctcaggtccactggcttgtagactatttgcacactgcctccgcccgggacgtgtttgatattgtcctttgagccacacttggactggacgttgctaagatccagcttcttattaattatctgcaccttgccgcctcccggctggtgcttcaggttctcagtggagccaatcttggacctgacgttctttaggtctggcatgggcacaggggcagtctgtaggcggctcttactggcagacggtgacttagggggagtgcgaaccactgccacctttttgggctctcgggtgggcggcgttggtagggatggggtacgggagcgactgccaggggttccgggcgagccggggctgctgtagccgcttcgttctccggattttggtggttcacctgatcctggaggagtctttgggctgggtgtggtcttggctgggatcctggtggcattggatgtgcctttctggcccggagtggctgctccccgaggtgtggcgatcttcgcccccgttttgccatcggcgcccttggctttcttctcgtcatttcctgtcctgtctttgcttacgccggccactcgagcttgagtcacatgcccagcagcttggtcctccatgttcggggtgtctccgatgcctgcttcttcagctgtggtgccttctgggatctccgtgtgggactgggcagtcgcctgcttgtcgggagctctctcttccactaggggcgcagtcacgtcttcagcagttggagtgctcttagcatcagaggtctccgaccctggttcttctgatccatcatcggctgggggctgtgggggagactcttttaagccatggtccatgtctccttcttggtcttggagcatagtgtaatctccggcctggtcttccattgtgtcaaactcctggcggggttcagccatgctgcttcaaagcctgataatcgacaggaggcgaggacagaagaggacagcggaggggaaggtggttgtggcggcggcgacagcagaaggtgggcggt

SEQ ID NO: 11 - RNA, 1487 nt, Canis lupus
  source 1..1487: mol_type = mRNA
cgcgctcgcgctctcagccacccaccagctcccgcaccagcagcagcagcgccgccgccgccgccgccgccgccgccgcccaccttctgctgccgccaccacagccactttctcctctttcctctcctgtcctcgccctctgtcgactatcaggtgggccttgacctaggatggctgagccccgccaggagttcactgtgatggaagatcatgctgggacatacgggaaagatctcccctctcaggggggctacaccctgctgcaagaccatgagggggacgtggatcacggcctgaaagctgaagaagcaggcattggagacacccccaacctggaagaccaagctgctggacatgtgactcaagctcgcatggtcagtaaaggcaaagatgggactggaaccgatgacaaaaaagccaagggggctgatggtaaaactggaacgaagatcgccacaccccggggagcgaccccttcaggccagaaaggccaggccaatgccaccaggattccagcgaaaaccacgccctcccccaagaccccaccgggcggtgaatctggaaaatctggggatcgcagtggctacagcagccccggctccccaggcactcctggcagccgctcccgcaccccgtccctgccaaccccacccacccgggagcccaagaaggtggcggtggtccgcaccccacccaagtcgccgtctgcagccaagagtcgcctgcagaccgcccctgtgcccatgccagacctaaagaacgtcagatccaagatcggctccactgaaaacctgaagcaccagccaggaggtgggaaggtgcaaatagtgtacaaaccagtggatctgagcaaggtgacctccaagtgcggctcattaggcaacatccatcataagccaggaggcggtcaggtggaagtcaaatctgagaagctggacttcaaggacagagtccagtcgaagatcgggtccctggacaacatcacccacgtccctggcggagggaataaaaagatcgaaacccacaagctgaccttccgtgagaacgccaaagccaagaccgaccacggggcggagatcgtgtacaagtcgcccgtggtgtccggggacacgtctccgcggcacctgagcaacgtgtcctccacgggcagcatcgacatggtcgactcgccccagctcgccacgctagccgacgaagtgtccgcctccctggccaagcagggtttgtgatcaggcccccggggcggtcaatgatcgtggagagaagagagtgtggaaaaaaaaagaataatgatctggcccttctcgccctctgccctcccccagctgctcctcacagaccggttaatcggttaatcacttaacctgcttttgtcgctcggctctggctcgggacttcaaaatcagtgacgggaaaaagcaaatttcatctttccaaattgatgggtgggctaataataataaaatatttttaaaaccatttaaaaa

SEQ ID NO: 12 - RNA, 1487 nt, Canis lupus
  source 1..1487: mol_type = other RNA
tttttaaatggttttaaaaatattttattattattagcccacccatcaatttggaaagatgaaatttgctttttcccgtcactgattttgaagtcccgagccagagccgagcgacaaaagcaggttaagtgattaaccgattaaccggtctgtgaggagcagctgggggagggcagagggcgagaagggccagatcattattctttttttttccacactctcttctctccacgatcattgaccgccccgggggcctgatcacaaaccctgcttggccagggaggcggacacttcgtcggctagcgtggcgagctggggcgagtcgaccatgtcgatgctgcccgtggaggacacgttgctcaggtgccgcggagacgtgtccccggacaccacgggcgacttgtacacgatctccgccccgtggtcggtcttggctttggcgttctcacggaaggtcagcttgtgggtttcgatctttttattccctccgccagggacgtgggtgatgttgtccagggacccgatcttcgactggactctgtccttgaagtccagcttctcagatttgacttccacctgaccgcctcctggcttatgatggatgttgcctaatgagccgcacttggaggtcaccttgctcagatccactggtttgtacactatttgcaccttcccacctcctggctggtgcttcaggttttcagtggagccgatcttggatctgacgttctttaggtctggcatgggcacaggggcggtctgcaggcgactcttggctgcagacggcgacttgggtggggtgcggaccaccgccaccttcttgggctcccgggtgggtggggttggcagggacggggtgcgggagcggctgccaggagtgcctggggagccggggctgctgtagccactgcgatccccagattttccagattcaccgcccggtggggtcttgggggagggcgtggttttcgctggaatcctggtggcattggcctggcctttctggcctgaaggggtcgctccccggggtgtggcgatcttcgttccagttttaccatcagcccccttggcttttttgtcatcggttccagtcccatctttgcctttactgaccatgcgagcttgagtcacatgtccagcagcttggtcttccaggttgggggtgtctccaatgcctgcttcttcagctttcaggccgtgatccacgtccccctcatggtcttgcagcagggtgtagcccccctgagaggggagatctttcccgtatgtcccagcatgatcttccatcacagtgaactcctggcggggctcagccatcctaggtcaaggcccacctgatagtcgacagagggcgaggacaggagaggaaagaggagaaagtggctgtggtggcggcagcagaaggtgggcggcggcggcggcggcggcggcggcggcgctgctgctgctggtgcgggagctggtgggtggctgagagcgcgagcgcg

SEQ ID NO: 13 - RNA, 93 nt, Homo sapiens
  source 1..93: mol_type = other RNA
gtgcagataattaataagaagctggatcttagcaacgtccagtccaagtgtggctcaaaggataatatcaaacacgtcccgggaggcggcagt

SEQ ID NO: 14 - protein, 16 aa, synthetic construct
AAVALLPAVLLALLAP

SEQ ID NO: 15 - protein, 11 aa, synthetic construct
AALLPVLLAAP

SEQ ID NO: 16 - protein, 13 aa, Human immunodeficiency virus 1
GRKKRRQRRRPPQ

SEQ ID NO: 17 - protein, 16 aa, Drosophila melanogaster
RQIKIWFQNRRMKWKK

SEQ ID NO: 18 - RNA, 21 nt, synthetic construct
  source 1..21: mol_type = other RNA
gcagataattaataagaagca

SEQ ID NO: 19 - RNA, 21 nt, synthetic construct
  source 1..21: mol_type = other RNA
cagataattaataagaagcta

SEQ ID NO: 20 - RNA, 21 nt, synthetic construct
  source 1..21: mol_type = other RNA
agataattaataagaagctga

SEQ ID NO: 21 - RNA, 21 nt, synthetic construct
  source 1..21: mol_type = other RNA
gataattaataagaagctgga

SEQ ID NO: 22 - RNA, 21 nt, synthetic construct
  source 1..21: mol_type = other RNA
ataattaataagaagctggaa

SEQ ID NO: 23 - RNA, 21 nt, synthetic construct
  source 1..21: mol_type = other RNA
taattaataagaagctggata

SEQ ID NO: 24 - RNA, 21 nt, synthetic construct
  source 1..21: mol_type = other RNA
aattaataagaagctggatca

SEQ ID NO: 25 - RNA, 21 nt, synthetic construct
  source 1..21: mol_type = other RNA
attaataagaagctggatcta

SEQ ID NO: 26 - RNA, 21 nt, synthetic construct
  source 1..21: mol_type = other RNA
ttaataagaagctggatctta

SEQ ID NO: 27 - RNA, 21 nt, synthetic construct
  source 1..21: mol_type = other RNA
taataagaagctggatcttaa

SEQ ID NO: 28 - RNA, 21 nt, synthetic construct
  source 1..21: mol_type = other RNA
aataagaagctggatcttaga

SEQ ID NO: 29 - RNA, 21 nt, synthetic construct
  source 1..21: mol_type = other RNA
ataagaagctggatcttagca

SEQ ID NO: 30 - RNA, 21 nt, synthetic construct
  source 1..21: mol_type = other RNA
taagaagctggatcttagcaa

SEQ ID NO: 31 - RNA, 21 nt, synthetic construct
  source 1..21: mol_type = other RNA
aagaagctggatcttagcaaa

SEQ ID NO: 32 - RNA, 21 nt, synthetic construct
  source 1..21: mol_type = other RNA
agaagctggatcttagcaaca

SEQ ID NO: 33 - RNA, 21 nt, synthetic construct
  source 1..21: mol_type = other RNA
gaagctggatcttagcaacga

SEQ ID NO: 34 - RNA, 21 nt, synthetic construct
  source 1..21: mol_type = other RNA
aagctggatcttagcaacgta

SEQ ID NO: 35 - RNA, 21 nt, synthetic construct
  source 1..21: mol_type = other RNA
agctggatcttagcaacgtca

SEQ ID NO: 36 - RNA, 21 nt, synthetic construct
  source 1..21: mol_type = other RNA
gctggatcttagcaacgtcca

SEQ ID NO: 37 - RNA, 21 nt, synthetic construct
  source 1..21: mol_type = other RNA
ctggatcttagcaacgtccaa

SEQ ID NO: 38 - RNA, 21 nt, synthetic construct
  source 1..21: mol_type = other RNA
tggatcttagcaacgtccaga

SEQ ID NO: 39 - RNA, 21 nt, synthetic construct
  source 1..21: mol_type = other RNA
ggatcttagcaacgtccagta

SEQ ID NO: 40 - RNA, 21 nt, synthetic construct
  source 1..21: mol_type = other RNA
gatcttagcaacgtccagtca

SEQ ID NO: 41 - RNA, 21 nt, synthetic construct
  source 1..21: mol_type = other RNA
atcttagcaacgtccagtcca

SEQ ID NO: 42 - RNA, 21 nt, synthetic construct
  source 1..21: mol_type = other RNA
tcttagcaacgtccagtccaa

SEQ ID NO: 43 - RNA, 21 nt, synthetic construct
  source 1..21: mol_type = other RNA
cttagcaacgtccagtccaaa

SEQ ID NO: 44 - RNA, 21 nt, synthetic construct
  source 1..21: mol_type = other RNA
ttagcaacgtccagtccaaga

SEQ ID NO: 45 - RNA, 21 nt, synthetic construct
  source 1..21: mol_type = other RNA
tagcaacgtccagtccaagta

SEQ ID NO: 46 - RNA, 21 nt, synthetic construct
  source 1..21: mol_type = other RNA
agcaacgtccagtccaagtga

SEQ ID NO: 47 - RNA, 21 nt, synthetic construct
  source 1..21: mol_type = other RNA
gcaacgtccagtccaagtgta

SEQ ID NO: 48 - RNA, 21 nt, synthetic construct
  source 1..21: mol_type = other RNA
caacgtccagtccaagtgtga

SEQ ID NO: 49 - RNA, 21 nt, synthetic construct
  source 1..21: mol_type = other RNA
aacgtccagtccaagtgtgga

SEQ ID NO: 50 - RNA, 21 nt, synthetic construct
  source 1..21: mol_type = other RNA
acgtccagtccaagtgtggca

SEQ ID NO: 51 - RNA, 21 nt, synthetic construct
  source 1..21: mol_type = other RNA
cgtccagtccaagtgtggcta

SEQ ID NO: 52 - RNA, 21 nt, synthetic construct
  source 1..21: mol_type = other RNA
gtccagtccaagtgtggctca

SEQ ID NO: 53 - RNA, 21 nt, synthetic construct
  source 1..21: mol_type = other RNA
tccagtccaagtgtggctcaa

SEQ ID NO: 54 - RNA, 21 nt, synthetic construct
  source 1..21: mol_type = other RNA
ccagtccaagtgtggctcaaa

SEQ ID NO: 55 - RNA, 21 nt, synthetic construct
  source 1..21: mol_type = other RNA
cagtccaagtgtggctcaaaa

SEQ ID NO: 56 - RNA, 21 nt, synthetic construct
  source 1..21: mol_type = other RNA
agtccaagtgtggctcaaaga

SEQ ID NO: 57 - RNA, 21 nt, synthetic construct
  source 1..21: mol_type = other RNA
gtccaagtgtggctcaaagga

SEQ ID NO: 58 - RNA, 21 nt, synthetic construct
  source 1..21: mol_type = other RNA
tccaagtgtggctcaaaggaa

SEQ ID NO: 59 - RNA, 21 nt, synthetic construct
  source 1..21: mol_type = other RNA
ccaagtgtggctcaaaggata

SEQ ID NO: 60 - RNA, 21 nt, synthetic construct
  source 1..21: mol_type = other RNA
caagtgtggctcaaaggataa

SEQ ID NO: 61 - RNA, 21 nt, synthetic construct
  source 1..21: mol_type = other RNA
aagtgtggctcaaaggataaa

SEQ ID NO: 62 - RNA, 21 nt, synthetic construct
  source 1..21: mol_type = other RNA
agtgtggctcaaaggataata

SEQ ID NO: 63 - RNA, 21 nt, synthetic construct
  source 1..21: mol_type = other RNA
gtgtggctcaaaggataataa

SEQ ID NO: 64 - RNA, 21 nt, synthetic construct
  source 1..21: mol_type = other RNA
tgtggctcaaaggataatata

SEQ ID NO: 65 - RNA, 21 nt, synthetic construct
  source 1..21: mol_type = other RNA
gtggctcaaaggataatatca

SEQ ID NO: 66 - RNA, 21 nt, synthetic construct
  source 1..21: mol_type = other RNA
tggctcaaaggataatatcaa

SEQ ID NO: 67 - RNA, 21 nt, synthetic construct
  source 1..21: mol_type = other RNA
ggctcaaaggataatatcaaa

SEQ ID NO: 68 - RNA, 21 nt, synthetic construct
  source 1..21: mol_type = other RNA
gctcaaaggataatatcaaaa

SEQ ID NO: 69 - RNA, 21 nt, synthetic construct
  source 1..21: mol_type = other RNA
ctcaaaggataatatcaaaca

SEQ ID NO: 70 - RNA, 21 nt, synthetic construct
  source 1..21: mol_type = other RNA
tcaaaggataatatcaaacaa

SEQ ID NO: 71 - RNA, 21 nt, synthetic construct
  source 1..21: mol_type = other RNA
caaaggataatatcaaacaca

SEQ ID NO: 72 - RNA, 21 nt, synthetic construct
  source 1..21: mol_type = other RNA
aaaggataatatcaaacacga

SEQ ID NO: 73 - RNA, 21 nt, synthetic construct
  source 1..21: mol_type = other RNA
aaggataatatcaaacacgta

SEQ ID NO: 74 - RNA, 21 nt, synthetic construct
  source 1..21: mol_type = other RNA
aggataatatcaaacacgtca

SEQ ID NO: 75 - RNA, 21 nt, synthetic construct
  source 1..21: mol_type = other RNA
ggataatatcaaacacgtcca

SEQ ID NO: 76 - RNA, 21 nt, synthetic construct
  source 1..21: mol_type = other RNA
gataatatcaaacacgtccca

SEQ ID NO: 77 - RNA, 21 nt, synthetic construct
  source 1..21: mol_type = other RNA
ataatatcaaacacgtcccga

SEQ ID NO: 78 - RNA, 21 nt, synthetic construct
  source 1..21: mol_type = other RNA
taatatcaaacacgtcccgga

SEQ ID NO: 79 - RNA, 21 nt, synthetic construct
  source 1..21: mol_type = other RNA
taatatcaaacacgtcccgga

SEQ ID NO: 80 - RNA, 21 nt, synthetic construct
  source 1..21: mol_type = other RNA
aatatcaaacacgtcccggga

SEQ ID NO: 81 - RNA, 21 nt, synthetic construct
  source 1..21: mol_type = other RNA
atatcaaacacgtcccgggaa

SEQ ID NO: 82 - RNA, 21 nt, synthetic construct
  source 1..21: mol_type = other RNA
atatcaaacacgtcccgggaa

SEQ ID NO: 83 - RNA, 21 nt, synthetic construct
  source 1..21: mol_type = other RNA
tatcaaacacgtcccgggaga

SEQ ID NO: 84 - RNA, 21 nt, synthetic construct
  source 1..21: mol_type = other RNA
atcaaacacgtcccgggagga

SEQ ID NO: 85 - RNA, 21 nt, synthetic construct
  source 1..21: mol_type = other RNA
tcaaacacgtcccgggaggca

SEQ ID NO: 86 - RNA, 21 nt, synthetic construct
  source 1..21: mol_type = other RNA
tcaaacacgtcccgggaggca

SEQ ID NO: 87 - RNA, 21 nt, synthetic construct
  source 1..21: mol_type = other RNA
caaacacgtcccgggaggcga

SEQ ID NO: 88 - RNA, 21 nt, synthetic construct
  source 1..21: mol_type = other RNA
caaacacgtcccgggaggcga

SEQ ID NO: 89 - RNA, 21 nt, synthetic construct
  source 1..21: mol_type = other RNA
aaacacgtcccgggaggcgga

SEQ ID NO: 90 - RNA, 21 nt, synthetic construct
  source 1..21: mol_type = other RNA
aaacacgtcccgggaggcgga

SEQ ID NO: 91 - RNA, 21 nt, synthetic construct
  source 1..21: mol_type = other RNA
aacacgtcccgggaggcggca

SEQ ID NO: 92 - RNA, 21 nt, synthetic construct
  source 1..21: mol_type = other RNA
aacacgtcccgggaggcggca

SEQ ID NO: 93 - RNA, 21 nt, synthetic construct
  source 1..21: mol_type = other RNA
acacgtcccgggaggcggcaa

SEQ ID NO: 94 - RNA, 21 nt, synthetic construct
  source 1..21: mol_type = other RNA
cacgtcccgggaggcggcaga

SEQ ID NO: 95 - RNA, 23 nt, synthetic construct
  source 1..23: mol_type = other RNA
  modified_base 5: mod_base = OTHER; note = 5'-methyluridine-3'-phosphate
  modified_base 7: mod_base = OTHER; note = 5'-methyluridine-3'-phosphate
tgcttcttattaattatctgcac

SEQ ID NO: 96 - RNA, 23 nt, synthetic construct
  source 1..23: mol_type = other RNA
  modified_base 5: mod_base = OTHER; note = 5'-methyluridine-3'-phosphate
  modified_base 12: mod_base = OTHER; note = 5'-methyluridine-3'-phosphate
tagcttcttattaattatctgca

SEQ ID NO: 97 - RNA, 23 nt, synthetic construct
  source 1..23: mol_type = other RNA
  modified_base 7: mod_base = OTHER; note = 5'-methyluridine-3'-phosphate
  modified_base 12: mod_base = OTHER; note = 5'-methyluridine-3'-phosphate
tcagcttcttattaattatctgc

SEQ ID NO: 98 - RNA, 23 nt, synthetic construct
  source 1..23: mol_type = other RNA
  modified_base 7: mod_base = OTHER; note = 5'-methyluridine-3'-phosphate
tccagcttcttattaattatctg

SEQ ID NO: 99 - RNA, 23 nt, synthetic construct
  source 1..23: mol_type = other RNA
  modified_base 2: mod_base = OTHER; note = 5'-methyluridine-3'-phosphate
  modified_base 12: mod_base = OTHER; note = 5'-methyluridine-3'-phosphate
ttccagcttcttattaattatct

SEQ ID NO: 100 - RNA, 23 nt, synthetic construct
  source 1..23: mol_type = other RNA
  modified_base 12: mod_base = OTHER; note = 5'-methyluridine-3'-phosphate
tatccagcttcttattaattatc

SEQ ID NO: 101 - RNA, 23 nt, synthetic construct
  source 1..23: mol_type = other RNA
tgatccagcttcttattaattat

SEQ ID NO: 102 - RNA, 23 nt, synthetic construct
  source 1..23: mol_type = other RNA
  modified_base 5: mod_base = OTHER; note = 5'-methyluridine-3'-phosphate
  modified_base 12: mod_base = OTHER; note = 5'-methyluridine-3'-phosphate
tagatccagcttcttattaatta

SEQ ID NO: 103 - RNA, 23 nt, synthetic construct
  source 1..23: mol_type = other RNA
  modified_base 12: mod_base = OTHER; note = 5'-methyluridine-3'-phosphate
taagatccagcttcttattaatt

SEQ ID NO: 104 - RNA, 23 nt, synthetic construct
  source 1..23: mol_type = other RNA
  modified_base 2: mod_base = OTHER; note = 5'-methyluridine-3'-phosphate
  modified_base 7: mod_base = OTHER; note = 5'-methyluridine-3'-phosphate
ttaagatccagcttcttattaat

SEQ ID NO: 105 - RNA, 23 nt, synthetic construct
  source 1..23: mol_type = other RNA
tctaagatccagcttcttattaa

SEQ ID NO: 106 - RNA, 23 nt, synthetic construct
  source 1..23: mol_type = other RNA
tgctaagatccagcttcttatta

SEQ ID NO: 107 - RNA, 23 nt, synthetic construct
  source 1..23: mol_type = other RNA
  modified_base 2: mod_base = OTHER; note = 5'-methyluridine-3'-phosphate
  modified_base 5: mod_base = OTHER; note = 5'-methyluridine-3'-phosphate
ttgctaagatccagcttcttatt

SEQ ID NO: 108 - RNA, 23 nt, synthetic construct
  source 1..23: mol_type = other RNA
  modified_base 2: mod_base = OTHER; note = 5'-methyluridine-3'-phosphate
tttgctaagatccagcttcttat

SEQ ID NO: 109 - RNA, 23 nt, synthetic construct
  source 1..23: mol_type = other RNA
  modified_base 7: mod_base = OTHER; note = 5'-methyluridine-3'-phosphate
  modified_base 12: mod_base = OTHER; note = 5'-methyluridine-3'-phosphate
tgttgctaagatccagcttctta

SEQ ID NO: 110 - RNA, 23 nt, synthetic construct
  source 1..23: mol_type = other RNA
  modified_base 5: mod_base = OTHER; note = 5'-methyluridine-3'-phosphate
tcgttgctaagatccagcttctt

SEQ ID NO: 111 - RNA, 23 nt, synthetic construct
  source 1..23: mol_type = other RNA
  modified_base 5: mod_base = OTHER; note = 5'-methyluridine-3'-phosphate
tacgttgctaagatccagcttct

SEQ ID NO: 112 - RNA, 23 nt, synthetic construct
  source 1..23: mol_type = other RNA
  modified_base 7: mod_base = OTHER; note = 5'-methyluridine-3'-phosphate
tgacgttgctaagatccagcttc

SEQ ID NO: 113 - RNA, 23 nt, synthetic construct
  source 1..23: mol_type = other RNA
  modified_base 7: mod_base = OTHER; note = 5'-methyluridine-3'-phosphate
tggacgttgctaagatccagctt

SEQ ID NO: 114 - RNA, 23 nt, synthetic construct
  source 1..23: mol_type = other RNA
  modified_base 2: mod_base = OTHER; note = 5'-methyluridine-3'-phosphate
  modified_base 12: mod_base = OTHER; note = 5'-methyluridine-3'-phosphate
ttggacgttgctaagatccagct

SEQ ID NO: 115 - RNA, 23 nt, synthetic construct
  source 1..23: mol_type = other RNA
tctggacgttgctaagatccagc

SEQ ID NO: 116 - RNA, 23 nt, synthetic construct
  source 1..23: mol_type = other RNA
tactggacgttgctaagatccag

SEQ ID NO: 117 - RNA, 23 nt, synthetic construct
  source 1..23: mol_type = other RNA
  modified_base 5: mod_base = OTHER; note = 5'-methyluridine-3'-phosphate
  modified_base 12: mod_base = OTHER; note = 5'-methyluridine-3'-phosphate
tgactggacgttgctaagatcca

SEQ ID NO: 118 - RNA, 23 nt, synthetic construct
  source 1..23: mol_type = other RNA
  modified_base 12: mod_base = OTHER; note = 5'-methyluridine-3'-phosphate
tggactggacgttgctaagatcc

SEQ ID NO: 119 - RNA, 23 nt, synthetic construct
  source 1..23: mol_type = other RNA
  modified_base 2: mod_base = OTHER; note = 5'-methyluridine-3'-phosphate
  modified_base 7: mod_base = OTHER; note = 5'-methyluridine-3'-phosphate
ttggactggacgttgctaagatc

SEQ ID NO: 120 - RNA, 23 nt, synthetic construct
  source 1..23: mol_type = other RNA
  modified_base 2: mod_base = OTHER; note = 5'-methyluridine-3'-phosphate
tttggactggacgttgctaagat

SEQ ID NO: 121 - RNA, 23 nt, synthetic construct
  source 1..23: mol_type = other RNA
tcttggactggacgttgctaaga

SEQ ID NO: 122 - RNA, 23 nt, synthetic construct
  source 1..23: mol_type = other RNA
  modified_base 5: mod_base = OTHER; note = 5'-methyluridine-3'-phosphate
tacttggactggacgttgctaag

SEQ ID NO: 123 - RNA, 23 nt, synthetic construct
  source 1..23: mol_type = other RNA
  modified_base 5: mod_base = OTHER; note = 5'-methyluridine-3'-phosphate
tcacttggactggacgttgctaa

SEQ ID NO: 124 - RNA, 23 nt, synthetic construct
  source 1..23: mol_type = other RNA
  modified_base 7: mod_base = OTHER; note = 5'-methyluridine-3'-phosphate
  modified_base 12: mod_base = OTHER; note = 5'-methyluridine-3'-phosphate
tacacttggactggacgttgcta

SEQ ID NO: 125 - RNA, 23 nt, synthetic construct
  source 1..23: mol_type = other RNA
  modified_base 7: mod_base = OTHER; note = 5'-methyluridine-3'-phosphate
tcacacttggactggacgttgct

SEQ ID NO: 126 - RNA, 23 nt, synthetic construct
  source 1..23: mol_type = other RNA
tccacacttggactggacgttgc

SEQ ID NO: 127 - RNA, 23 nt, synthetic construct
  source 1..23: mol_type = other RNA
tgccacacttggactggacgttg

SEQ ID NO: 128 - RNA, 23 nt, synthetic construct
  source 1..23: mol_type = other RNA
tagccacacttggactggacgtt

SEQ ID NO: 129 - RNA, 23 nt, synthetic construct
  source 1..23: mol_type = other RNA
  modified_base 12: mod_base = OTHER; note = 5'-methyluridine-3'-phosphate
tgagccacacttggactggacgt

SEQ ID NO: 130 - RNA, 23 nt, synthetic construct
  source 1..23: mol_type = other RNA
  modified_base 2: mod_base = OTHER; note = 5'-methyluridine-3'-phosphate
  modified_base 12: mod_base = OTHER; note = 5'-methyluridine-3'-phosphate
ttgagccacacttggactggacg

SEQ ID NO: 131 - RNA, 23 nt, synthetic construct
  source 1..23: mol_type = other RNA
  modified_base 2: mod_base = OTHER; note = 5'-methyluridine-3'-phosphate
tttgagccacacttggactggac

SEQ ID NO: 132 - RNA, 23 nt, synthetic construct
  source 1..23: mol_type = other RNA
  modified_base 2: mod_base = OTHER; note = 5'-methyluridine-3'-phosphate
ttttgagccacacttggactgga

SEQ ID NO: 133 - RNA, 23 nt, synthetic construct
  source 1..23: mol_type = other RNA
  modified_base 5: mod_base = OTHER; note = 5'-methyluridine-3'-phosphate
tctttgagccacacttggactgg

SEQ ID NO: 134 - RNA, 23 nt, synthetic construct
  source 1..23: mol_type = other RNA
  modified_base 5: mod_base = OTHER; note = 5'-methyluridine-3'-phosphate
tcctttgagccacacttggactg

SEQ ID NO: 135 - RNA, 23 nt, synthetic construct
  source 1..23: mol_type = other RNA
  modified_base 2: mod_base = OTHER; note = 5'-methyluridine-3'-phosphate
  modified_base 5: mod_base = OTHER; note = 5'-methyluridine-3'-phosphate
  modified_base 7: mod_base = OTHER; note = 5'-methyluridine-3'-phosphate
ttcctttgagccacacttggact

SEQ ID NO: 136 - RNA, 23 nt, synthetic construct
  source 1..23: mol_type = other RNA
  modified_base 7: mod_base = OTHER; note = 5'-methyluridine-3'-phosphate
tatcctttgagccacacttggac

SEQ ID NO: 137 - RNA, 23 nt, synthetic construct
  source 1..23: mol_type = other RNA
  modified_base 2: mod_base = OTHER; note = 5'-methyluridine-3'-phosphate
  modified_base 7: mod_base = OTHER; note = 5'-methyluridine-3'-phosphate
ttatcctttgagccacacttgga

SEQ ID NO: 138 - RNA, 23 nt, synthetic construct
  source 1..23: mol_type = other RNA
  modified_base 2: mod_base = OTHER; note = 5'-methyluridine-3'-phosphate
  modified_base 5: mod_base = OTHER; note = 5'-methyluridine-3'-phosphate
tttatcctttgagccacacttgg

SEQ ID NO: 139 - RNA, 23 nt, synthetic construct
  source 1..23: mol_type = other RNA
tattatcctttgagccacacttg

SEQ ID NO: 140 - RNA, 23 nt, synthetic construct
  source 1..23: mol_type = other RNA
  modified_base 2: mod_base = OTHER; note = 5'-methyluridine-3'-phosphate
  modified_base 5: mod_base = OTHER; note = 5'-methyluridine-3'-phosphate
  modified_base 7: mod_base = OTHER; note = 5'-methyluridine-3'-phosphate
  modified_base 12: mod_base = OTHER; note = 5'-methyluridine-3'-phosphate
ttattatcctttgagccacactt

SEQ ID NO: 141 - RNA, 23 nt, synthetic construct
  source 1..23: mol_type = other RNA
  modified_base 5: mod_base = OTHER; note = 5'-methyluridine-3'-phosphate
  modified_base 12: mod_base = OTHER; note = 5'-methyluridine-3'-phosphate
tatattatcctttgagccacact

SEQ ID NO: 142 - RNA, 23 nt, synthetic construct
  source 1..23: mol_type = other RNA
  modified_base 7: mod_base = OTHER; note = 5'-methyluridine-3'-phosphate
  modified_base 12: mod_base = OTHER; note = 5'-methyluridine-3'-phosphate
tgatattatcctttgagccacac

SEQ ID NO: 143 - RNA, 23 nt, synthetic construct
  source 1..23: mol_type = other RNA
  modified_base 2: mod_base = OTHER; note = 5'-methyluridine-3'-phosphate
  modified_base 5: mod_base = OTHER; note = 5'-methyluridine-3'-phosphate
  modified_base 7: mod_base = OTHER; note = 5'-methyluridine-3'-phosphate
ttgatattatcctttgagccaca

SEQ ID NO: 144 - RNA, 23 nt, synthetic construct
  source 1..23: mol_type = other RNA
  modified_base 2: mod_base = OTHER; note = 5'-methyluridine-3'-phosphate
tttgatattatcctttgagccac

SEQ ID NO: 145 - RNA, 23 nt, synthetic construct
  source 1..23: mol_type = other RNA
  modified_base 2: mod_base = OTHER; note = 5'-methyluridine-3'-phosphate
  modified_base 7: mod_base = OTHER; note = 5'-methyluridine-3'-phosphate
  modified_base 12: mod_base = OTHER; note = 5'-methyluridine-3'-phosphate
ttttgatattatcctttgagcca

SEQ ID NO: 146 - RNA, 23 nt, synthetic construct
  source 1..23: mol_type = other RNA
  modified_base 5: mod_base = OTHER; note = 5'-methyluridine-3'-phosphate
tgtttgatattatcctttgagcc

SEQ ID NO: 147 - RNA, 23 nt, synthetic construct
  source 1..23: mol_type = other RNA
  modified_base 2: mod_base = OTHER; note = 5'-methyluridine-3'-phosphate
  modified_base 5: mod_base = OTHER; note = 5'-methyluridine-3'-phosphate
  modified_base 12: mod_base = OTHER; note = 5'-methyluridine-3'-phosphate
ttgtttgatattatcctttgagc

SEQ ID NO: 148 - RNA, 23 nt, synthetic construct
  source 1..23: mol_type = other RNA
  modified_base 5: mod_base = OTHER; note = 5'-methyluridine-3'-phosphate
  modified_base 7: mod_base = OTHER; note = 5'-methyluridine-3'-phosphate
  modified_base 12: mod_base = OTHER; note = 5'-methyluridine-3'-phosphate
tgtgtttgatattatcctttgag

SEQ ID NO: 149 - RNA, 23 nt, synthetic construct
  source 1..23: mol_type = other RNA
  modified_base 7: mod_base = OTHER; note = 5'-methyluridine-3'-phosphate
tcgtgtttgatattatcctttga

SEQ ID NO: 150 - RNA, 23 nt, synthetic construct
  source 1..23: mol_type = other RNA
  modified_base 5: mod_base = OTHER; note = 5'-methyluridine-3'-phosphate
  modified_base 7: mod_base = OTHER; note = 5'-methyluridine-3'-phosphate
  modified_base 12: mod_base = OTHER; note = 5'-methyluridine-3'-phosphate
tacgtgtttgatattatcctttg

SEQ ID NO: 151 - RNA, 23 nt, synthetic construct
  source 1..23: mol_type = other RNA
tgacgtgtttgatattatccttt

SEQ ID NO: 152 - RNA, 23 nt, synthetic construct
  source 1..23: mol_type = other RNA
  modified_base 7: mod_base = OTHER; note = 5'-methyluridine-3'-phosphate
tggacgtgtttgatattatcctt

SEQ ID NO: 153 - RNA, 23 nt, synthetic construct
  source 1..23: mol_type = other RNA
  modified_base 12: mod_base = OTHER; note = 5'-methyluridine-3'-phosphate
tgggacgtgtttgatattatcct

SEQ ID NO: 154 - RNA, 23 nt, synthetic construct
  source 1..23: mol_type = other RNA
  modified_base 12: mod_base = OTHER; note = 5'-methyluridine-3'-phosphate
tcgggacgtgtttgatattatcc

SEQ ID NO: 155 - RNA, 23 nt, synthetic construct
  source 1..23: mol_type = other RNA
  modified_base 12: mod_base = OTHER; note = 5'-methyluridine-3'-phosphate
tccgggacgtgtttgatattatc

SEQ ID NO: 156 - RNA, 23 nt, synthetic construct
  source 1..23: mol_type = other RNA
tccgggacgtgtttgatattatc

SEQ ID NO: 157 - RNA, 23 nt, synthetic construct
  source 1..23: mol_type = other RNA
tcccgggacgtgtttgatattat

SEQ ID NO: 158 - RNA, 23 nt, synthetic construct
  source 1..23: mol_type = other RNA
  modified_base 2: mod_base = OTHER; note = 5'-methyluridine-3'-phosphate
  modified_base 12: mod_base = OTHER; note = 5'-methyluridine-3'-phosphate
ttcccgggacgtgtttgatatta

SEQ ID NO: 159 - RNA, 23 nt, synthetic construct
  source 1..23: mol_type = other RNA
ttcccgggacgtgtttgatatta

SEQ ID NO: 160 - RNA, 23 nt, synthetic construct
  source 1..23: mol_type = other RNA
tctcccgggacgtgtttgatatt

SEQ ID NO: 161 - RNA, 23 nt, synthetic construct
  source 1..23: mol_type = other RNA
tcctcccgggacgtgtttgatat

SEQ ID NO: 162 - RNA, 23 nt, synthetic construct
  source 1..23: mol_type = other RNA
  modified_base 5: mod_base = OTHER; note = 5'-methyluridine-3'-phosphate
tgcctcccgggacgtgtttgata

SEQ ID NO: 163 - RNA, 23 nt, synthetic construct
  source 1..23: mol_type = other RNA
  modified_base 5: mod_base = OTHER; note = 5'-methyluridine-3'-phosphate
tgcctcccgggacgtgtttgata

SEQ ID NO: 164 - RNA, 23 nt, synthetic construct
  source 1..23: mol_type = other RNA
tcgcctcccgggacgtgtttgat

SEQ ID NO: 165 - RNA, 23 nt, synthetic construct
  source 1..23: mol_type = other RNA
tcgcctcccgggacgtgtttgat

SEQ ID NO: 166 - RNA, 23 nt, synthetic construct
  source 1..23: mol_type = other RNA
  modified_base 7: mod_base = OTHER; note = 5'-methyluridine-3'-phosphate
tccgcctcccgggacgtgtttga

SEQ ID NO: 167 - RNA, 23 nt, synthetic construct
  source 1..23: mol_type = other RNA
  modified_base 7: mod_base = OTHER; note = 5'-methyluridine-3'-phosphate
tccgcctcccgggacgtgtttga

SEQ ID NO: 168 - RNA, 23 nt, synthetic construct
  source 1..23: mol_type = other RNA
tgccgcctcccgggacgtgtttg

SEQ ID NO: 169 - RNA, 23 nt, synthetic construct
  source 1..23: mol_type = other RNA
tgccgcctcccgggacgtgtttg

SEQ ID NO: 170 - RNA, 23 nt, synthetic construct
  source 1..23: mol_type = other RNA
ttgccgcctcccgggacgtgttt

SEQ ID NO: 171 - RNA, 23 nt, synthetic construct
  source 1..23: mol_type = other RNA
tctgccgcctcccgggacgtgtt

SEQ ID NO: 172 - RNA, 21 nt, synthetic construct
  source 1..21: mol_type = other RNA
  modified_base 1: mod_base = OTHER; note = 2'-O-methylguanosine-3'-phosphorothioate
  modified_base 2: mod_base = OTHER; note = 2'-O-methylcytidine-3'-phosphorothioate
  modified_base 3: mod_base = OTHER; note = 2'-O-methyladenosine-3'-phosphate
  modified_base 4: mod_base = OTHER; note = 2'-O-methylguanosine-3'-phosphate
  modified_base 5: mod_base = OTHER; note = 2'-O-methyladenosine-3'-phosphate
  modified_base 6: mod_base = OTHER; note = 2'-O-hexadecyl-uridine-3'-phosphate
  modified_base 7: mod_base = OTHER; note = 2'-O-methyladenosine-3'-phosphate
  modified_base 8: mod_base = OTHER; note = 2'-O-methyladenosine-3'-phosphate
  modified_base 9: mod_base = OTHER; note = 2'-deoxy-2'-fluorouridine-3'-phosphate
  modified_base 10: mod_base = OTHER; note = 2'-deoxy-2'-fluorouridine-3'-phosphate
  modified_base 11: mod_base = OTHER; note = 2'-deoxy-2'-fluoroadenosine-3'-phosphate
  modified_base 12: mod_base = OTHER; note = 2'-O-methyladenosine-3'-phosphate
  modified_base 13: mod_base = OTHER; note = 2'-O-methyluridine-3'-phosphate
  modified_base 14: mod_base = OTHER; note = 2'-O-methyladenosine-3'-phosphate
  modified_base 15: mod_base = OTHER; note = 2'-O-methyladenosine-3'-phosphate
  modified_base 16: mod_base = OTHER; note = 2'-O-methylguanosine-3'-phosphate
  modified_base 17: mod_base = OTHER; note = 2'-O-methyladenosine-3'-phosphate
  modified_base 18: mod_base = OTHER; note = 2'-O-methyladenosine-3'-phosphate
  modified_base 19: mod_base = OTHER; note = 2'-O-methylguanosine-3'-phosphate
  modified_base 20: mod_base = OTHER; note = 2'-O-methylcytidine-3'-phosphate
  modified_base 21: mod_base = OTHER; note = 2'-O-methyladenosine-3'-phosphate ((2S,4R)-1-[29-[[2-(acetylamino)-2-deoxy-beta-D-galactopyra nosyl]oxy]-14,14-bis[[3-[[3-[[5-[[2-(acetylamino)-2-deoxy-b eta-D-galactopyranosyl]oxy]-1-oxopentyl]amino]propyl]amino] -3-oxopropoxy]methyl]-1,12,19,25-tetraoxo-16-oxa-13,20,24-t riazanonacos-1-yl]-4-hydroxy-2-pyrrolidinyl)methyl ester
gcagataattaataagaagca

SEQ ID NO: 173 - RNA, 21 nt, synthetic construct
  source 1..21: mol_type = other RNA
  modified_base 1: mod_base = OTHER; note = 2'-O-methylcytidine-3'-phosphorothioate
  modified_base 2: mod_base = OTHER; note = 2'-O-methyladenosine-3'-phosphorothioate
  modified_base 3: mod_base = OTHER; note = 2'-O-methylguanosine-3'-phosphate
  modified_base 4: mod_base = OTHER; note = 2'-O-methyladenosine-3'-phosphate
  modified_base 5: mod_base = OTHER; note = 2'-O-methyluridine-3'-phosphate
  modified_base 6: mod_base = OTHER; note = 2'-O-hexadecyl-adenosine-3'-phosphate
  modified_base 7: mod_base = OTHER; note = 2'-O-methyladenosine-3'-phosphate
  modified_base 8: mod_base = OTHER; note = 2'-O-methyluridine-3'-phosphate
  modified_base 9: mod_base = OTHER; note = 2'-deoxy-2'-fluorouridine-3'-phosphate
  modified_base 10: mod_base = OTHER; note = 2'-deoxy-2'-fluoroadenosine-3'-phosphate
  modified_base 11: mod_base = OTHER; note = 2'-deoxy-2'-fluoroadenosine-3'-phosphate
  modified_base 12: mod_base = OTHER; note = 2'-O-methyluridine-3'-phosphate
  modified_base 13: mod_base = OTHER; note = 2'-O-methyladenosine-3'-phosphate
  modified_base 14: mod_base = OTHER; note = 2'-O-methyladenosine-3'-phosphate
  modified_base 15: mod_base = OTHER; note = 2'-O-methylguanosine-3'-phosphate
  modified_base 16: mod_base = OTHER; note = 2'-O-methyladenosine-3'-phosphate
  modified_base 17: mod_base = OTHER; note = 2'-O-methyladenosine-3'-phosphate
  modified_base 18: mod_base = OTHER; note = 2'-O-methylguanosine-3'-phosphate
  modified_base 19: mod_base = OTHER; note = 2'-O-methylcytidine-3'-phosphate
  modified_base 20: mod_base = OTHER; note = 2'-O-methyluridine-3'-phosphate
  modified_base 21: mod_base = OTHER; note = 2'-O-methyladenosine-3'-phosphate ((2S,4R)-1-[29-[[2-(acetylamino)-2-deoxy-beta-D-galactopyra nosyl]oxy]-14,14-bis[[3-[[3-[[5-[[2-(acetylamino)-2-deoxy-b eta-D-galactopyranosyl]oxy]-1-oxopentyl]amino]propyl]amino] -3-oxopropoxy]methyl]-1,12,19,25-tetraoxo-16-oxa-13,20,24-t riazanonacos-1-yl]-4-hydroxy-2-pyrrolidinyl)methyl ester
cagataattaataagaagcta

SEQ ID NO: 174 - RNA, 21 nt, synthetic construct
  source 1..21: mol_type = other RNA
  modified_base 1: mod_base = OTHER; note = 2'-O-methyladenosine-3'-phosphorothioate
  modified_base 2: mod_base = OTHER; note = 2'-O-methylguanosine-3'-phosphorothioate
  modified_base 3: mod_base = OTHER; note = 2'-O-methyladenosine-3'-phosphate
  modified_base 4: mod_base = OTHER; note = 2'-O-methyluridine-3'-phosphate
  modified_base 5: mod_base = OTHER; note = 2'-O-methyladenosine-3'-phosphate
  modified_base 6: mod_base = OTHER; note = 2'-O-hexadecyl-adenosine-3'-phosphate
  modified_base 7: mod_base = OTHER; note = 2'-O-methyluridine-3'-phosphate
  modified_base 8: mod_base = OTHER; note = 2'-O-methyluridine-3'-phosphate
  modified_base 9: mod_base = OTHER; note = 2'-deoxy-2'-fluoroadenosine-3'-phosphate
  modified_base 10: mod_base = OTHER; note = 2'-deoxy-2'-fluoroadenosine-3'-phosphate
  modified_base 11: mod_base = OTHER; note = 2'-deoxy-2'-fluorouridine-3'-phosphate
  modified_base 12: mod_base = OTHER; note = 2'-O-methyladenosine-3'-phosphate
  modified_base 13: mod_base = OTHER; note = 2'-O-methyladenosine-3'-phosphate
  modified_base 14: mod_base = OTHER; note = 2'-O-methylguanosine-3'-phosphate
  modified_base 15: mod_base = OTHER; note = 2'-O-methyladenosine-3'-phosphate
  modified_base 16: mod_base = OTHER; note = 2'-O-methyladenosine-3'-phosphate
  modified_base 17: mod_base = OTHER; note = 2'-O-methylguanosine-3'-phosphate
  modified_base 18: mod_base = OTHER; note = 2'-O-methylcytidine-3'-phosphate
  modified_base 19: mod_base = OTHER; note = 2'-O-methyluridine-3'-phosphate
  modified_base 20: mod_base = OTHER; note = 2'-O-methylguanosine-3'-phosphate
  modified_base 21: mod_base = OTHER; note = 2'-O-methyladenosine-3'-phosphate ((2S,4R)-1-[29-[[2-(acetylamino)-2-deoxy-beta-D-galactopyra nosyl]oxy]-14,14-bis[[3-[[3-[[5-[[2-(acetylamino)-2-deoxy-b eta-D-galactopyranosyl]oxy]-1-oxopentyl]amino]propyl]amino] -3-oxopropoxy]methyl]-1,12,19,25-tetraoxo-16-oxa-13,20,24-t riazanonacos-1-yl]-4-hydroxy-2-pyrrolidinyl)methyl ester
agataattaataagaagctga

SEQ ID NO: 175 - RNA, 21 nt, synthetic construct
  source 1..21: mol_type = other RNA
  modified_base 1: mod_base = OTHER; note = 2'-O-methylguanosine-3'-phosphorothioate
  modified_base 2: mod_base = OTHER; note = 2'-O-methyladenosine-3'-phosphorothioate
  modified_base 3: mod_base = OTHER; note = 2'-O-methyluridine-3'-phosphate
  modified_base 4: mod_base = OTHER; note = 2'-O-methyladenosine-3'-phosphate
  modified_base 5: mod_base = OTHER; note = 2'-O-methyladenosine-3'-phosphate
  modified_base 6: mod_base = OTHER; note = 2'-O-hexadecyl-uridine-3'-phosphate
  modified_base 7: mod_base = OTHER; note = 2'-O-methyluridine-3'-phosphate
  modified_base 8: mod_base = OTHER; note = 2'-O-methyladenosine-3'-phosphate
  modified_base 9: mod_base = OTHER; note = 2'-deoxy-2'-fluoroadenosine-3'-phosphate
  modified_base 10: mod_base = OTHER; note = 2'-deoxy-2'-fluorouridine-3'-phosphate
  modified_base 11: mod_base = OTHER; note = 2'-deoxy-2'-fluoroadenosine-3'-phosphate
  modified_base 12: mod_base = OTHER; note = 2'-O-methyladenosine-3'-phosphate
  modified_base 13: mod_base = OTHER; note = 2'-O-methylguanosine-3'-phosphate
  modified_base 14: mod_base = OTHER; note = 2'-O-methyladenosine-3'-phosphate
  modified_base 15: mod_base = OTHER; note = 2'-O-methyladenosine-3'-phosphate
  modified_base 16: mod_base = OTHER; note = 2'-O-methylguanosine-3'-phosphate
  modified_base 17: mod_base = OTHER; note = 2'-O-methylcytidine-3'-phosphate
  modified_base 18: mod_base = OTHER; note = 2'-O-methyluridine-3'-phosphate
  modified_base 19: mod_base = OTHER; note = 2'-O-methylguanosine-3'-phosphate
  modified_base 20: mod_base = OTHER; note = 2'-O-methylguanosine-3'-phosphate
  modified_base 21: mod_base = OTHER; note = 2'-O-methyladenosine-3'-phosphate ((2S,4R)-1-[29-[[2-(acetylamino)-2-deoxy-beta-D-galactopyra nosyl]oxy]-14,14-bis[[3-[[3-[[5-[[2-(acetylamino)-2-deoxy-b eta-D-galactopyranosyl]oxy]-1-oxopentyl]amino]propyl]amino] -3-oxopropoxy]methyl]-1,12,19,25-tetraoxo-16-oxa-13,20,24-t riazanonacos-1-yl]-4-hydroxy-2-pyrrolidinyl)methyl ester
gataattaataagaagctgga

SEQ ID NO: 176 - RNA, 21 nt, synthetic construct
  source 1..21: mol_type = other RNA
  modified_base 1: mod_base = OTHER; note = 2'-O-methyladenosine-3'-phosphorothioate
  modified_base 2: mod_base = OTHER; note = 2'-O-methyluridine-3'-phosphorothioate
  modified_base 3: mod_base = OTHER; note = 2'-O-methyladenosine-3'-phosphate
  modified_base 4: mod_base = OTHER; note = 2'-O-methyladenosine-3'-phosphate
  modified_base 5: mod_base = OTHER; note = 2'-O-methyluridine-3'-phosphate
  modified_base 6: mod_base = OTHER; note = 2'-O-hexadecyl-uridine-3'-phosphate
  modified_base 7: mod_base = OTHER; note = 2'-O-methyladenosine-3'-phosphate
  modified_base 8: mod_base = OTHER; note = 2'-O-methyladenosine-3'-phosphate
  modified_base 9: mod_base = OTHER; note = 2'-deoxy-2'-fluorouridine-3'-phosphate
  modified_base 10: mod_base = OTHER; note = 2'-deoxy-2'-fluoroadenosine-3'-phosphate
  modified_base 11: mod_base = OTHER; note = 2'-deoxy-2'-fluoroadenosine-3'-phosphate
  modified_base 12: mod_base = OTHER; note = 2'-O-methylguanosine-3'-phosphate
  modified_base 13: mod_base = OTHER; note = 2'-O-methyladenosine-3'-phosphate
  modified_base 14: mod_base = OTHER; note = 2'-O-methyladenosine-3'-phosphate
  modified_base 15: mod_base = OTHER; note = 2'-O-methylguanosine-3'-phosphate
  modified_base 16: mod_base = OTHER; note = 2'-O-methylcytidine-3'-phosphate
  modified_base 17: mod_base = OTHER; note = 2'-O-methyluridine-3'-phosphate
  modified_base 18: mod_base = OTHER; note = 2'-O-methylguanosine-3'-phosphate
  modified_base 19: mod_base = OTHER; note = 2'-O-methylguanosine-3'-phosphate
  modified_base 20: mod_base = OTHER; note = 2'-O-methyladenosine-3'-phosphate
  modified_base 21: mod_base = OTHER; note = 2'-O-methyladenosine-3'-phosphate ((2S,4R)-1-[29-[[2-(acetylamino)-2-deoxy-beta-D-galactopyra nosyl]oxy]-14,14-bis[[3-[[3-[[5-[[2-(acetylamino)-2-deoxy-b eta-D-galactopyranosyl]oxy]-1-oxopentyl]amino]propyl]amino] -3-oxopropoxy]methyl]-1,12,19,25-tetraoxo-16-oxa-13,20,24-t riazanonacos-1-yl]-4-hydroxy-2-pyrrolidinyl)methyl ester
ataattaataagaagctggaa

SEQ ID NO: 177 - RNA, 21 nt, synthetic construct
  source 1..21: mol_type = other RNA
  modified_base 1: mod_base = OTHER; note = 2'-O-methyluridine-3'-phosphorothioate
  modified_base 2: mod_base = OTHER; note = 2'-O-methyladenosine-3'-phosphorothioate
  modified_base 3: mod_base = OTHER; note = 2'-O-methyladenosine-3'-phosphate
  modified_base 4: mod_base = OTHER; note = 2'-O-methyluridine-3'-phosphate
  modified_base 5: mod_base = OTHER; note = 2'-O-methyluridine-3'-phosphate
  modified_base 6: mod_base = OTHER; note = 2'-O-hexadecyl-adenosine-3'-phosphate
  modified_base 7: mod_base = OTHER; note = 2'-O-methyladenosine-3'-phosphate
  modified_base 8: mod_base = OTHER; note = 2'-O-methyluridine-3'-phosphate
  modified_base 9: mod_base = OTHER; note = 2'-deoxy-2'-fluoroadenosine-3'-phosphate
  modified_base 10: mod_base = OTHER; note = 2'-deoxy-2'-fluoroadenosine-3'-phosphate
  modified_base 11: mod_base = OTHER; note = 2'-deoxy-2'-fluoroguanosine-3'-phosphate
  modified_base 12: mod_base = OTHER; note = 2'-O-methyladenosine-3'-phosphate
  modified_base 13: mod_base = OTHER; note = 2'-O-methyladenosine-3'-phosphate
  modified_base 14: mod_base = OTHER; note = 2'-O-methylguanosine-3'-phosphate
  modified_base 15: mod_base = OTHER; note = 2'-O-methylcytidine-3'-phosphate
  modified_base 16: mod_base = OTHER; note = 2'-O-methyluridine-3'-phosphate
  modified_base 17: mod_base = OTHER; note = 2'-O-methylguanosine-3'-phosphate
  modified_base 18: mod_base = OTHER; note = 2'-O-methylguanosine-3'-phosphate
  modified_base 19: mod_base = OTHER; note = 2'-O-methyladenosine-3'-phosphate
  modified_base 20: mod_base = OTHER; note = 2'-O-methyluridine-3'-phosphate
  modified_base 21: mod_base = OTHER; note = 2'-O-methyladenosine-3'-phosphate ((2S,4R)-1-[29-[[2-(acetylamino)-2-deoxy-beta-D-galactopyra nosyl]oxy]-14,14-bis[[3-[[3-[[5-[[2-(acetylamino)-2-deoxy-b eta-D-galactopyranosyl]oxy]-1-oxopentyl]amino]propyl]amino] -3-oxopropoxy]methyl]-1,12,19,25-tetraoxo-16-oxa-13,20,24-t riazanonacos-1-yl]-4-hydroxy-2-pyrrolidinyl)methyl ester
taattaataagaagctggata

SEQ ID NO: 178 - RNA, 21 nt, synthetic construct
  source 1..21: mol_type = other RNA
  modified_base 1: mod_base = OTHER; note = 2'-O-methyladenosine-3'-phosphorothioate
  modified_base 2: mod_base = OTHER; note = 2'-O-methyladenosine-3'-phosphorothioate
  modified_base 3: mod_base = OTHER; note = 2'-O-methyluridine-3'-phosphate
  modified_base 4: mod_base = OTHER; note = 2'-O-methyluridine-3'-phosphate
  modified_base 5: mod_base = OTHER; note = 2'-O-methyladenosine-3'-phosphate
  modified_base 6: mod_base = OTHER; note = 2'-O-hexadecyl-adenosine-3'-phosphate
  modified_base 7: mod_base = OTHER; note = 2'-O-methyluridine-3'-phosphate
  modified_base 8: mod_base = OTHER; note = 2'-O-methyladenosine-3'-phosphate
  modified_base 9: mod_base = OTHER; note = 2'-deoxy-2'-fluoroadenosine-3'-phosphate
  modified_base 10: mod_base = OTHER; note = 2'-deoxy-2'-fluoroguanosine-3'-phosphate
  modified_base 11: mod_base = OTHER; note = 2'-deoxy-2'-fluoroadenosine-3'-phosphate
  modified_base 12: mod_base = OTHER; note = 2'-O-methyladenosine-3'-phosphate
  modified_base 13: mod_base = OTHER; note = 2'-O-methylguanosine-3'-phosphate
  modified_base 14: mod_base = OTHER; note = 2'-O-methylcytidine-3'-phosphate
  modified_base 15: mod_base = OTHER; note = 2'-O-methyluridine-3'-phosphate
  modified_base 16: mod_base = OTHER; note = 2'-O-methylguanosine-3'-phosphate
  modified_base 17: mod_base = OTHER; note = 2'-O-methylguanosine-3'-phosphate
  modified_base 18: mod_base = OTHER; note = 2'-O-methyladenosine-3'-phosphate
  modified_base 19: mod_base = OTHER; note = 2'-O-methyluridine-3'-phosphate
  modified_base 20: mod_base = OTHER; note = 2'-O-methylcytidine-3'-phosphate
  modified_base 21: mod_base = OTHER; note = 2'-O-methyladenosine-3'-phosphate ((2S,4R)-1-[29-[[2-(acetylamino)-2-deoxy-beta-D-galactopyra nosyl]oxy]-14,14-bis[[3-[[3-[[5-[[2-(acetylamino)-2-deoxy-b eta-D-galactopyranosyl]oxy]-1-oxopentyl]amino]propyl]amino] -3-oxopropoxy]methyl]-1,12,19,25-tetraoxo-16-oxa-13,20,24-t riazanonacos-1-yl]-4-hydroxy-2-pyrrolidinyl)methyl ester
aattaataagaagctggatca

SEQ ID NO: 179 - RNA, 21 nt, synthetic construct
  source 1..21: mol_type = other RNA
  modified_base 1: mod_base = OTHER; note = 2'-O-methyladenosine-3'-phosphorothioate
  modified_base 2: mod_base = OTHER; note = 2'-O-methyluridine-3'-phosphorothioate
  modified_base 3: mod_base = OTHER; note = 2'-O-methyluridine-3'-phosphate
  modified_base 4: mod_base = OTHER; note = 2'-O-methyladenosine-3'-phosphate
  modified_base 5: mod_base = OTHER; note = 2'-O-methyladenosine-3'-phosphate
  modified_base 6: mod_base = OTHER; note = 2'-O-hexadecyl-uridine-3'-phosphate
  modified_base 7: mod_base = OTHER; note = 2'-O-methyladenosine-3'-phosphate
  modified_base 8: mod_base = OTHER; note = 2'-O-methyladenosine-3'-phosphate
  modified_base 9: mod_base = OTHER; note = 2'-deoxy-2'-fluoroguanosine-3'-phosphate
  modified_base 10: mod_base = OTHER; note = 2'-deoxy-2'-fluoroadenosine-3'-phosphate
  modified_base 11: mod_base = OTHER; note = 2'-deoxy-2'-fluoroadenosine-3'-phosphate
  modified_base 12: mod_base = OTHER; note = 2'-O-methylguanosine-3'-phosphate
  modified_base 13: mod_base = OTHER; note = 2'-O-methylcytidine-3'-phosphate
  modified_base 14: mod_base = OTHER; note = 2'-O-methyluridine-3'-phosphate
  modified_base 15: mod_base = OTHER; note = 2'-O-methylguanosine-3'-phosphate
  modified_base 16: mod_base = OTHER; note = 2'-O-methylguanosine-3'-phosphate
  modified_base 17: mod_base = OTHER; note = 2'-O-methyladenosine-3'-phosphate
  modified_base 18: mod_base = OTHER; note = 2'-O-methyluridine-3'-phosphate
  modified_base 19: mod_base = OTHER; note = 2'-O-methylcytidine-3'-phosphate
  modified_base 20: mod_base = OTHER; note = 2'-O-methyluridine-3'-phosphate
  modified_base 21: mod_base = OTHER; note = 2'-O-methyladenosine-3'-phosphate ((2S,4R)-1-[29-[[2-(acetylamino)-2-deoxy-beta-D-galactopyra nosyl]oxy]-14,14-bis[[3-[[3-[[5-[[2-(acetylamino)-2-deoxy-b eta-D-galactopyranosyl]oxy]-1-oxopentyl]amino]propyl]amino] -3-oxopropoxy]methyl]-1,12,19,25-tetraoxo-16-oxa-13,20,24-t riazanonacos-1-yl]-4-hydroxy-2-pyrrolidinyl)methyl ester
attaataagaagctggatcta

SEQ ID NO: 180 - RNA, 21 nt, synthetic construct
  source 1..21: mol_type = other RNA
  modified_base 1: mod_base = OTHER; note = 2'-O-methyluridine-3'-phosphorothioate
  modified_base 2: mod_base = OTHER; note = 2'-O-methyluridine-3'-phosphorothioate
  modified_base 3: mod_base = OTHER; note = 2'-O-methyladenosine-3'-phosphate
  modified_base 4: mod_base = OTHER; note = 2'-O-methyladenosine-3'-phosphate
  modified_base 5: mod_base = OTHER; note = 2'-O-methyluridine-3'-phosphate
  modified_base 6: mod_base = OTHER; note = 2'-O-hexadecyl-adenosine-3'-phosphate
  modified_base 7: mod_base = OTHER; note = 2'-O-methyladenosine-3'-phosphate
  modified_base 8: mod_base = OTHER; note = 2'-O-methylguanosine-3'-phosphate
  modified_base 9: mod_base = OTHER; note = 2'-deoxy-2'-fluoroadenosine-3'-phosphate
  modified_base 10: mod_base = OTHER; note = 2'-deoxy-2'-fluoroadenosine-3'-phosphate
  modified_base 11: mod_base = OTHER; note = 2'-deoxy-2'-fluoroguanosine-3'-phosphate
  modified_base 12: mod_base = OTHER; note = 2'-O-methylcytidine-3'-phosphate
  modified_base 13: mod_base = OTHER; note = 2'-O-methyluridine-3'-phosphate
  modified_base 14: mod_base = OTHER; note = 2'-O-methylguanosine-3'-phosphate
  modified_base 15: mod_base = OTHER; note = 2'-O-methylguanosine-3'-phosphate
  modified_base 16: mod_base = OTHER; note = 2'-O-methyladenosine-3'-phosphate
  modified_base 17: mod_base = OTHER; note = 2'-O-methyluridine-3'-phosphate
  modified_base 18: mod_base = OTHER; note = 2'-O-methylcytidine-3'-phosphate
  modified_base 19: mod_base = OTHER; note = 2'-O-methyluridine-3'-phosphate
  modified_base 20: mod_base = OTHER; note = 2'-O-methyluridine-3'-phosphate
  modified_base 21: mod_base = OTHER; note = 2'-O-methyladenosine-3'-phosphate ((2S,4R)-1-[29-[[2-(acetylamino)-2-deoxy-beta-D-galactopyra nosyl]oxy]-14,14-bis[[3-[[3-[[5-[[2-(acetylamino)-2-deoxy-b eta-D-galactopyranosyl]oxy]-1-oxopentyl]amino]propyl]amino] -3-oxopropoxy]methyl]-1,12,19,25-tetraoxo-16-oxa-13,20,24-t riazanonacos-1-yl]-4-hydroxy-2-pyrrolidinyl)methyl ester
ttaataagaagctggatctta

SEQ ID NO: 181 - RNA, 21 nt, synthetic construct
  source 1..21: mol_type = other RNA
  modified_base 1: mod_base = OTHER; note = 2'-O-methyluridine-3'-phosphorothioate
  modified_base 2: mod_base = OTHER; note = 2'-O-methyladenosine-3'-phosphorothioate
  modified_base 3: mod_base = OTHER; note = 2'-O-methyladenosine-3'-phosphate
  modified_base 4: mod_base = OTHER; note = 2'-O-methyluridine-3'-phosphate
  modified_base 5: mod_base = OTHER; note = 2'-O-methyladenosine-3'-phosphate
  modified_base 6: mod_base = OTHER; note = 2'-O-hexadecyl-adenosine-3'-phosphate
  modified_base 7: mod_base = OTHER; note = 2'-O-methylguanosine-3'-phosphate
  modified_base 8: mod_base = OTHER; note = 2'-O-methyladenosine-3'-phosphate
  modified_base 9: mod_base = OTHER; note = 2'-deoxy-2'-fluoroadenosine-3'-phosphate
  modified_base 10: mod_base = OTHER; note = 2'-deoxy-2'-fluoroguanosine-3'-phosphate
  modified_base 11: mod_base = OTHER; note = 2'-deoxy-2'-fluorocytidine-3'-phosphate
  modified_base 12: mod_base = OTHER; note = 2'-O-methyluridine-3'-phosphate
  modified_base 13: mod_base = OTHER; note = 2'-O-methylguanosine-3'-phosphate
  modified_base 14: mod_base = OTHER; note = 2'-O-methylguanosine-3'-phosphate
  modified_base 15: mod_base = OTHER; note = 2'-O-methyladenosine-3'-phosphate
  modified_base 16: mod_base = OTHER; note = 2'-O-methyluridine-3'-phosphate
  modified_base 17: mod_base = OTHER; note = 2'-O-methylcytidine-3'-phosphate
  modified_base 18: mod_base = OTHER; note = 2'-O-methyluridine-3'-phosphate
  modified_base 19: mod_base = OTHER; note = 2'-O-methyluridine-3'-phosphate
  modified_base 20: mod_base = OTHER; note = 2'-O-methyladenosine-3'-phosphate
  modified_base 21: mod_base = OTHER; note = 2'-O-methyladenosine-3'-phosphate ((2S,4R)-1-[29-[[2-(acetylamino)-2-deoxy-beta-D-galactopyra nosyl]oxy]-14,14-bis[[3-[[3-[[5-[[2-(acetylamino)-2-deoxy-b eta-D-galactopyranosyl]oxy]-1-oxopentyl]amino]propyl]amino] -3-oxopropoxy]methyl]-1,12,19,25-tetraoxo-16-oxa-13,20,24-t riazanonacos-1-yl]-4-hydroxy-2-pyrrolidinyl)methyl ester
taataagaagctggatcttaa

SEQ ID NO: 182 - RNA, 21 nt, synthetic construct
  source 1..21: mol_type = other RNA
  modified_base 1: mod_base = OTHER; note = 2'-O-methyladenosine-3'-phosphorothioate
  modified_base 2: mod_base = OTHER; note = 2'-O-methyladenosine-3'-phosphorothioate
  modified_base 3: mod_base = OTHER; note = 2'-O-methyluridine-3'-phosphate
  modified_base 4: mod_base = OTHER; note = 2'-O-methyladenosine-3'-phosphate
  modified_base 5: mod_base = OTHER; note = 2'-O-methyladenosine-3'-phosphate
  modified_base 6: mod_base = OTHER; note = 2'-O-hexadecyl-guanosine-3'-phosphate
  modified_base 7: mod_base = OTHER; note = 2'-O-methyladenosine-3'-phosphate
  modified_base 8: mod_base = OTHER; note = 2'-O-methyladenosine-3'-phosphate
  modified_base 9: mod_base = OTHER; note = 2'-deoxy-2'-fluoroguanosine-3'-phosphate
  modified_base 10: mod_base = OTHER; note = 2'-deoxy-2'-fluorocytidine-3'-phosphate
  modified_base 11: mod_base = OTHER; note = 2'-deoxy-2'-fluorouridine-3'-phosphate
  modified_base 12: mod_base = OTHER; note = 2'-O-methylguanosine-3'-phosphate
  modified_base 13: mod_base = OTHER; note = 2'-O-methylguanosine-3'-phosphate
  modified_base 14: mod_base = OTHER; note = 2'-O-methyladenosine-3'-phosphate
  modified_base 15: mod_base = OTHER; note = 2'-O-methyluridine-3'-phosphate
  modified_base 16: mod_base = OTHER; note = 2'-O-methylcytidine-3'-phosphate
  modified_base 17: mod_base = OTHER; note = 2'-O-methyluridine-3'-phosphate
  modified_base 18: mod_base = OTHER; note = 2'-O-methyluridine-3'-phosphate
  modified_base 19: mod_base = OTHER; note = 2'-O-methyladenosine-3'-phosphate
  modified_base 20: mod_base = OTHER; note = 2'-O-methylguanosine-3'-phosphate
  modified_base 21: mod_base = OTHER; note = 2'-O-methyladenosine-3'-phosphate ((2S,4R)-1-[29-[[2-(acetylamino)-2-deoxy-beta-D-galactopyra nosyl]oxy]-14,14-bis[[3-[[3-[[5-[[2-(acetylamino)-2-deoxy-b eta-D-galactopyranosyl]oxy]-1-oxopentyl]amino]propyl]amino] -3-oxopropoxy]methyl]-1,12,19,25-tetraoxo-16-oxa-13,20,24-t riazanonacos-1-yl]-4-hydroxy-2-pyrrolidinyl)methyl ester
aataagaagctggatcttaga

SEQ ID NO: 183 - RNA, 21 nt, synthetic construct
  source 1..21: mol_type = other RNA
  modified_base 1: mod_base = OTHER; note = 2'-O-methyladenosine-3'-phosphorothioate
  modified_base 2: mod_base = OTHER; note = 2'-O-methyluridine-3'-phosphorothioate
  modified_base 3: mod_base = OTHER; note = 2'-O-methyladenosine-3'-phosphate
  modified_base 4: mod_base = OTHER; note = 2'-O-methyladenosine-3'-phosphate
  modified_base 5: mod_base = OTHER; note = 2'-O-methylguanosine-3'-phosphate
  modified_base 6: mod_base = OTHER; note = 2'-O-hexadecyl-adenosine-3'-phosphate
  modified_base 7: mod_base = OTHER; note = 2'-O-methyladenosine-3'-phosphate
  modified_base 8: mod_base = OTHER; note = 2'-O-methylguanosine-3'-phosphate
  modified_base 9: mod_base = OTHER; note = 2'-deoxy-2'-fluorocytidine-3'-phosphate
  modified_base 10: mod_base = OTHER; note = 2'-deoxy-2'-fluorouridine-3'-phosphate
  modified_base 11: mod_base = OTHER; note = 2'-deoxy-2'-fluoroguanosine-3'-phosphate
  modified_base 12: mod_base = OTHER; note = 2'-O-methylguanosine-3'-phosphate
  modified_base 13: mod_base = OTHER; note = 2'-O-methyladenosine-3'-phosphate
  modified_base 14: mod_base = OTHER; note = 2'-O-methyluridine-3'-phosphate
  modified_base 15: mod_base = OTHER; note = 2'-O-methylcytidine-3'-phosphate
  modified_base 16: mod_base = OTHER; note = 2'-O-methyluridine-3'-phosphate
  modified_base 17: mod_base = OTHER; note = 2'-O-methyluridine-3'-phosphate
  modified_base 18: mod_base = OTHER; note = 2'-O-methyladenosine-3'-phosphate
  modified_base 19: mod_base = OTHER; note = 2'-O-methylguanosine-3'-phosphate
  modified_base 20: mod_base = OTHER; note = 2'-O-methylcytidine-3'-phosphate
  modified_base 21: mod_base = OTHER; note = 2'-O-methyladenosine-3'-phosphate ((2S,4R)-1-[29-[[2-(acetylamino)-2-deoxy-beta-D-galactopyra nosyl]oxy]-14,14-bis[[3-[[3-[[5-[[2-(acetylamino)-2-deoxy-b eta-D-galactopyranosyl]oxy]-1-oxopentyl]amino]propyl]amino] -3-oxopropoxy]methyl]-1,12,19,25-tetraoxo-16-oxa-13,20,24-t riazanonacos-1-yl]-4-hydroxy-2-pyrrolidinyl)methyl ester
ataagaagctggatcttagca

SEQ ID NO: 184 - RNA, 21 nt, synthetic construct
  source 1..21: mol_type = other RNA
  modified_base 1: mod_base = OTHER; note = 2'-O-methyluridine-3'-phosphorothioate
  modified_base 2: mod_base = OTHER; note = 2'-O-methyladenosine-3'-phosphorothioate
  modified_base 3: mod_base = OTHER; note = 2'-O-methyladenosine-3'-phosphate
  modified_base 4: mod_base = OTHER; note = 2'-O-methylguanosine-3'-phosphate
  modified_base 5: mod_base = OTHER; note = 2'-O-methyladenosine-3'-phosphate
  modified_base 6: mod_base = OTHER; note = 2'-O-hexadecyl-adenosine-3'-phosphate
  modified_base 7: mod_base = OTHER; note = 2'-O-methylguanosine-3'-phosphate
  modified_base 8: mod_base = OTHER; note = 2'-O-methylcytidine-3'-phosphate
  modified_base 9: mod_base = OTHER; note = 2'-deoxy-2'-fluorouridine-3'-phosphate
  modified_base 10: mod_base = OTHER; note = 2'-deoxy-2'-fluoroguanosine-3'-phosphate
  modified_base 11: mod_base = OTHER; note = 2'-deoxy-2'-fluoroguanosine-3'-phosphate
  modified_base 12: mod_base = OTHER; note = 2'-O-methyladenosine-3'-phosphate
  modified_base 13: mod_base = OTHER; note = 2'-O-methyluridine-3'-phosphate
  modified_base 14: mod_base = OTHER; note = 2'-O-methylcytidine-3'-phosphate
  modified_base 15: mod_base = OTHER; note = 2'-O-methyluridine-3'-phosphate
  modified_base 16: mod_base = OTHER; note = 2'-O-methyluridine-3'-phosphate
  modified_base 17: mod_base = OTHER; note = 2'-O-methyladenosine-3'-phosphate
  modified_base 18: mod_base = OTHER; note = 2'-O-methylguanosine-3'-phosphate
  modified_base 19: mod_base = OTHER; note = 2'-O-methylcytidine-3'-phosphate
  modified_base 20: mod_base = OTHER; note = 2'-O-methyladenosine-3'-phosphate
  modified_base 21: mod_base = OTHER; note = 2'-O-methyladenosine-3'-phosphate ((2S,4R)-1-[29-[[2-(acetylamino)-2-deoxy-beta-D-galactopyra nosyl]oxy]-14,14-bis[[3-[[3-[[5-[[2-(acetylamino)-2-deoxy-b eta-D-galactopyranosyl]oxy]-1-oxopentyl]amino]propyl]amino] -3-oxopropoxy]methyl]-1,12,19,25-tetraoxo-16-oxa-13,20,24-t riazanonacos-1-yl]-4-hydroxy-2-pyrrolidinyl)methyl ester
taagaagctggatcttagcaa

SEQ ID NO: 185 - RNA, 21 nt, synthetic construct
  source 1..21: mol_type = other RNA
  modified_base 1: mod_base = OTHER; note = 2'-O-methyladenosine-3'-phosphorothioate
  modified_base 2: mod_base = OTHER; note = 2'-O-methyladenosine-3'-phosphorothioate
  modified_base 3: mod_base = OTHER; note = 2'-O-methylguanosine-3'-phosphate
  modified_base 4: mod_base = OTHER; note = 2'-O-methyladenosine-3'-phosphate
  modified_base 5: mod_base = OTHER; note = 2'-O-methyladenosine-3'-phosphate
  modified_base 6: mod_base = OTHER; note = 2'-O-hexadecyl-guanosine-3'-phosphate
  modified_base 7: mod_base = OTHER; note = 2'-O-methylcytidine-3'-phosphate
  modified_base 8: mod_base = OTHER; note = 2'-O-methyluridine-3'-phosphate
  modified_base 9: mod_base = OTHER; note = 2'-deoxy-2'-fluoroguanosine-3'-phosphate
  modified_base 10: mod_base = OTHER; note = 2'-deoxy-2'-fluoroguanosine-3'-phosphate
  modified_base 11: mod_base = OTHER; note = 2'-deoxy-2'-fluoroadenosine-3'-phosphate
  modified_base 12: mod_base = OTHER; note = 2'-O-methyluridine-3'-phosphate
  modified_base 13: mod_base = OTHER; note = 2'-O-methylcytidine-3'-phosphate
  modified_base 14: mod_base = OTHER; note = 2'-O-methyluridine-3'-phosphate
  modified_base 15: mod_base = OTHER; note = 2'-O-methyluridine-3'-phosphate
  modified_base 16: mod_base = OTHER; note = 2'-O-methyladenosine-3'-phosphate
  modified_base 17: mod_base = OTHER; note = 2'-O-methylguanosine-3'-phosphate
  modified_base 18: mod_base = OTHER; note = 2'-O-methylcytidine-3'-phosphate
  modified_base 19: mod_base = OTHER; note = 2'-O-methyladenosine-3'-phosphate
  modified_base 20: mod_base = OTHER; note = 2'-O-methyladenosine-3'-phosphate
  modified_base 21: mod_base = OTHER; note = 2'-O-methyladenosine-3'-phosphate ((2S,4R)-1-[29-[[2-(acetylamino)-2-deoxy-beta-D-galactopyra nosyl]oxy]-14,14-bis[[3-[[3-[[5-[[2-(acetylamino)-2-deoxy-b eta-D-galactopyranosyl]oxy]-1-oxopentyl]amino]propyl]amino] -3-oxopropoxy]methyl]-1,12,19,25-tetraoxo-16-oxa-13,20,24-t riazanonacos-1-yl]-4-hydroxy-2-pyrrolidinyl)methyl ester
aagaagctggatcttagcaaa

SEQ ID NO: 186 - RNA, 21 nt, synthetic construct
  source 1..21: mol_type = other RNA
  modified_base 1: mod_base = OTHER; note = 2'-O-methyladenosine-3'-phosphorothioate
  modified_base 2: mod_base = OTHER; note = 2'-O-methylguanosine-3'-phosphorothioate
  modified_base 3: mod_base = OTHER; note = 2'-O-methyladenosine-3'-phosphate
  modified_base 4: mod_base = OTHER; note = 2'-O-methyladenosine-3'-phosphate
  modified_base 5: mod_base = OTHER; note = 2'-O-methylguanosine-3'-phosphate
  modified_base 6: mod_base = OTHER; note = 2'-O-hexadecyl-cytidine-3'-phosphate
  modified_base 7: mod_base = OTHER; note = 2'-O-methyluridine-3'-phosphate
  modified_base 8: mod_base = OTHER; note = 2'-O-methylguanosine-3'-phosphate
  modified_base 9: mod_base = OTHER; note = 2'-deoxy-2'-fluoroguanosine-3'-phosphate
  modified_base 10: mod_base = OTHER; note = 2'-deoxy-2'-fluoroadenosine-3'-phosphate
  modified_base 11: mod_base = OTHER; note = 2'-deoxy-2'-fluorouridine-3'-phosphate
  modified_base 12: mod_base = OTHER; note = 2'-O-methylcytidine-3'-phosphate
  modified_base 13: mod_base = OTHER; note = 2'-O-methyluridine-3'-phosphate
  modified_base 14: mod_base = OTHER; note = 2'-O-methyluridine-3'-phosphate
  modified_base 15: mod_base = OTHER; note = 2'-O-methyladenosine-3'-phosphate
  modified_base 16: mod_base = OTHER; note = 2'-O-methylguanosine-3'-phosphate
  modified_base 17: mod_base = OTHER; note = 2'-O-methylcytidine-3'-phosphate
  modified_base 18: mod_base = OTHER; note = 2'-O-methyladenosine-3'-phosphate
  modified_base 19: mod_base = OTHER; note = 2'-O-methyladenosine-3'-phosphate
  modified_base 20: mod_base = OTHER; note = 2'-O-methylcytidine-3'-phosphate
  modified_base 21: mod_base = OTHER; note = 2'-O-methyladenosine-3'-phosphate ((2S,4R)-1-[29-[[2-(acetylamino)-2-deoxy-beta-D-galactopyra nosyl]oxy]-14,14-bis[[3-[[3-[[5-[[2-(acetylamino)-2-deoxy-b eta-D-galactopyranosyl]oxy]-1-oxopentyl]amino]propyl]amino] -3-oxopropoxy]methyl]-1,12,19,25-tetraoxo-16-oxa-13,20,24-t riazanonacos-1-yl]-4-hydroxy-2-pyrrolidinyl)methyl ester
agaagctggatcttagcaaca

SEQ ID NO: 187 - RNA, 21 nt, synthetic construct
  source 1..21: mol_type = other RNA
  modified_base 1: mod_base = OTHER; note = 2'-O-methylguanosine-3'-phosphorothioate
  modified_base 2: mod_base = OTHER; note = 2'-O-methyladenosine-3'-phosphorothioate
  modified_base 3: mod_base = OTHER; note = 2'-O-methyladenosine-3'-phosphate
  modified_base 4: mod_base = OTHER; note = 2'-O-methylguanosine-3'-phosphate
  modified_base 5: mod_base = OTHER; note = 2'-O-methylcytidine-3'-phosphate
  modified_base 6: mod_base = OTHER; note = 2'-O-hexadecyl-uridine-3'-phosphate
  modified_base 7: mod_base = OTHER; note = 2'-O-methylguanosine-3'-phosphate
  modified_base 8: mod_base = OTHER; note = 2'-O-methylguanosine-3'-phosphate
  modified_base 9: mod_base = OTHER; note = 2'-deoxy-2'-fluoroadenosine-3'-phosphate
  modified_base 10: mod_base = OTHER; note = 2'-deoxy-2'-fluorouridine-3'-phosphate
  modified_base 11: mod_base = OTHER; note = 2'-deoxy-2'-fluorocytidine-3'-phosphate
  modified_base 12: mod_base = OTHER; note = 2'-O-methyluridine-3'-phosphate
  modified_base 13: mod_base = OTHER; note = 2'-O-methyluridine-3'-phosphate
  modified_base 14: mod_base = OTHER; note = 2'-O-methyladenosine-3'-phosphate
  modified_base 15: mod_base = OTHER; note = 2'-O-methylguanosine-3'-phosphate
  modified_base 16: mod_base = OTHER; note = 2'-O-methylcytidine-3'-phosphate
  modified_base 17: mod_base = OTHER; note = 2'-O-methyladenosine-3'-phosphate
  modified_base 18: mod_base = OTHER; note = 2'-O-methyladenosine-3'-phosphate
  modified_base 19: mod_base = OTHER; note = 2'-O-methylcytidine-3'-phosphate
  modified_base 20: mod_base = OTHER; note = 2'-O-methylguanosine-3'-phosphate
  modified_base 21: mod_base = OTHER; note = 2'-O-methyladenosine-3'-phosphate ((2S,4R)-1-[29-[[2-(acetylamino)-2-deoxy-beta-D-galactopyra nosyl]oxy]-14,14-bis[[3-[[3-[[5-[[2-(acetylamino)-2-deoxy-b eta-D-galactopyranosyl]oxy]-1-oxopentyl]amino]propyl]amino] -3-oxopropoxy]methyl]-1,12,19,25-tetraoxo-16-oxa-13,20,24-t riazanonacos-1-yl]-4-hydroxy-2-pyrrolidinyl)methyl ester
gaagctggatcttagcaacga

SEQ ID NO: 188 - RNA, 21 nt, synthetic construct
  source 1..21: mol_type = other RNA
  modified_base 1: mod_base = OTHER; note = 2'-O-methyladenosine-3'-phosphorothioate
  modified_base 2: mod_base = OTHER; note = 2'-O-methyladenosine-3'-phosphorothioate
  modified_base 3: mod_base = OTHER; note = 2'-O-methylguanosine-3'-phosphate
  modified_base 4: mod_base = OTHER; note = 2'-O-methylcytidine-3'-phosphate
  modified_base 5: mod_base = OTHER; note = 2'-O-methyluridine-3'-phosphate
  modified_base 6: mod_base = OTHER; note = 2'-O-hexadecyl-guanosine-3'-phosphate
  modified_base 7: mod_base = OTHER; note = 2'-O-methylguanosine-3'-phosphate
  modified_base 8: mod_base = OTHER; note = 2'-O-methyladenosine-3'-phosphate
  modified_base 9: mod_base = OTHER; note = 2'-deoxy-2'-fluorouridine-3'-phosphate
  modified_base 10: mod_base = OTHER; note = 2'-deoxy-2'-fluorocytidine-3'-phosphate
  modified_base 11: mod_base = OTHER; note = 2'-deoxy-2'-fluorouridine-3'-phosphate
  modified_base 12: mod_base = OTHER; note = 2'-O-methyluridine-3'-phosphate
  modified_base 13: mod_base = OTHER; note = 2'-O-methyladenosine-3'-phosphate
  modified_base 14: mod_base = OTHER; note = 2'-O-methylguanosine-3'-phosphate
  modified_base 15: mod_base = OTHER; note = 2'-O-methylcytidine-3'-phosphate
  modified_base 16: mod_base = OTHER; note = 2'-O-methyladenosine-3'-phosphate
  modified_base 17: mod_base = OTHER; note = 2'-O-methyladenosine-3'-phosphate
  modified_base 18: mod_base = OTHER; note = 2'-O-methylcytidine-3'-phosphate
  modified_base 19: mod_base = OTHER; note = 2'-O-methylguanosine-3'-phosphate
  modified_base 20: mod_base = OTHER; note = 2'-O-methyluridine-3'-phosphate
  modified_base 21: mod_base = OTHER; note = 2'-O-methyladenosine-3'-phosphate ((2S,4R)-1-[29-[[2-(acetylamino)-2-deoxy-beta-D-galactopyra nosyl]oxy]-14,14-bis[[3-[[3-[[5-[[2-(acetylamino)-2-deoxy-b eta-D-galactopyranosyl]oxy]-1-oxopentyl]amino]propyl]amino] -3-oxopropoxy]methyl]-1,12,19,25-tetraoxo-16-oxa-13,20,24-t riazanonacos-1-yl]-4-hydroxy-2-pyrrolidinyl)methyl ester
aagctggatcttagcaacgta

SEQ ID NO: 189 - RNA, 21 nt, synthetic construct
  source 1..21: mol_type = other RNA
  modified_base 1: mod_base = OTHER; note = 2'-O-methyladenosine-3'-phosphorothioate
  modified_base 2: mod_base = OTHER; note = 2'-O-methylguanosine-3'-phosphorothioate
  modified_base 3: mod_base = OTHER; note = 2'-O-methylcytidine-3'-phosphate
  modified_base 4: mod_base = OTHER; note = 2'-O-methyluridine-3'-phosphate
  modified_base 5: mod_base = OTHER; note = 2'-O-methylguanosine-3'-phosphate
  modified_base 6: mod_base = OTHER; note = 2'-O-hexadecyl-guanosine-3'-phosphate
  modified_base 7: mod_base = OTHER; note = 2'-O-methyladenosine-3'-phosphate
  modified_base 8: mod_base = OTHER; note = 2'-O-methyluridine-3'-phosphate
  modified_base 9: mod_base = OTHER; note = 2'-deoxy-2'-fluorocytidine-3'-phosphate
  modified_base 10: mod_base = OTHER; note = 2'-deoxy-2'-fluorouridine-3'-phosphate
  modified_base 11: mod_base = OTHER; note = 2'-deoxy-2'-fluorouridine-3'-phosphate
  modified_base 12: mod_base = OTHER; note = 2'-O-methyladenosine-3'-phosphate
  modified_base 13: mod_base = OTHER; note = 2'-O-methylguanosine-3'-phosphate
  modified_base 14: mod_base = OTHER; note = 2'-O-methylcytidine-3'-phosphate
  modified_base 15: mod_base = OTHER; note = 2'-O-methyladenosine-3'-phosphate
  modified_base 16: mod_base = OTHER; note = 2'-O-methyladenosine-3'-phosphate
  modified_base 17: mod_base = OTHER; note = 2'-O-methylcytidine-3'-phosphate
  modified_base 18: mod_base = OTHER; note = 2'-O-methylguanosine-3'-phosphate
  modified_base 19: mod_base = OTHER; note = 2'-O-methyluridine-3'-phosphate
  modified_base 20: mod_base = OTHER; note = 2'-O-methylcytidine-3'-phosphate
  modified_base 21: mod_base = OTHER; note = 2'-O-methyladenosine-3'-phosphate ((2S,4R)-1-[29-[[2-(acetylamino)-2-deoxy-beta-D-galactopyra nosyl]oxy]-14,14-bis[[3-[[3-[[5-[[2-(acetylamino)-2-deoxy-b eta-D-galactopyranosyl]oxy]-1-oxopentyl]amino]propyl]amino] -3-oxopropoxy]methyl]-1,12,19,25-tetraoxo-16-oxa-13,20,24-t riazanonacos-1-yl]-4-hydroxy-2-pyrrolidinyl)methyl ester
agctggatcttagcaacgtca

SEQ ID NO: 190 - RNA, 21 nt, synthetic construct
  source 1..21: mol_type = other RNA
  modified_base 1: mod_base = OTHER; note = 2'-O-methylguanosine-3'-phosphorothioate
  modified_base 2: mod_base = OTHER; note = 2'-O-methylcytidine-3'-phosphorothioate
  modified_base 3: mod_base = OTHER; note = 2'-O-methyluridine-3'-phosphate
  modified_base 4: mod_base = OTHER; note = 2'-O-methylguanosine-3'-phosphate
  modified_base 5: mod_base = OTHER; note = 2'-O-methylguanosine-3'-phosphate
  modified_base 6: mod_base = OTHER; note = 2'-O-hexadecyl-adenosine-3'-phosphate
  modified_base 7: mod_base = OTHER; note = 2'-O-methyluridine-3'-phosphate
  modified_base 8: mod_base = OTHER; note = 2'-O-methylcytidine-3'-phosphate
  modified_base 9: mod_base = OTHER; note = 2'-deoxy-2'-fluorouridine-3'-phosphate
  modified_base 10: mod_base = OTHER; note = 2'-deoxy-2'-fluorouridine-3'-phosphate
  modified_base 11: mod_base = OTHER; note = 2'-deoxy-2'-fluoroadenosine-3'-phosphate
  modified_base 12: mod_base = OTHER; note = 2'-O-methylguanosine-3'-phosphate
  modified_base 13: mod_base = OTHER; note = 2'-O-methylcytidine-3'-phosphate
  modified_base 14: mod_base = OTHER; note = 2'-O-methyladenosine-3'-phosphate
  modified_base 15: mod_base = OTHER; note = 2'-O-methyladenosine-3'-phosphate
  modified_base 16: mod_base = OTHER; note = 2'-O-methylcytidine-3'-phosphate
  modified_base 17: mod_base = OTHER; note = 2'-O-methylguanosine-3'-phosphate
  modified_base 18: mod_base = OTHER; note = 2'-O-methyluridine-3'-phosphate
  modified_base 19: mod_base = OTHER; note = 2'-O-methylcytidine-3'-phosphate
  modified_base 20: mod_base = OTHER; note = 2'-O-methylcytidine-3'-phosphate
  modified_base 21: mod_base = OTHER; note = 2'-O-methyladenosine-3'-phosphate ((2S,4R)-1-[29-[[2-(acetylamino)-2-deoxy-beta-D-galactopyra nosyl]oxy]-14,14-bis[[3-[[3-[[5-[[2-(acetylamino)-2-deoxy-b eta-D-galactopyranosyl]oxy]-1-oxopentyl]amino]propyl]amino] -3-oxopropoxy]methyl]-1,12,19,25-tetraoxo-16-oxa-13,20,24-t riazanonacos-1-yl]-4-hydroxy-2-pyrrolidinyl)methyl ester
gctggatcttagcaacgtcca

SEQ ID NO: 191 - RNA, 21 nt, synthetic construct
  source 1..21: mol_type = other RNA
  modified_base 1: mod_base = OTHER; note = 2'-O-methylcytidine-3'-phosphorothioate
  modified_base 2: mod_base = OTHER; note = 2'-O-methyluridine-3'-phosphorothioate
  modified_base 3: mod_base = OTHER; note = 2'-O-methylguanosine-3'-phosphate
  modified_base 4: mod_base = OTHER; note = 2'-O-methylguanosine-3'-phosphate
  modified_base 5: mod_base = OTHER; note = 2'-O-methyladenosine-3'-phosphate
  modified_base 6: mod_base = OTHER; note = 2'-O-hexadecyl-uridine-3'-phosphate
  modified_base 7: mod_base = OTHER; note = 2'-O-methylcytidine-3'-phosphate
  modified_base 8: mod_base = OTHER; note = 2'-O-methyluridine-3'-phosphate
  modified_base 9: mod_base = OTHER; note = 2'-deoxy-2'-fluorouridine-3'-phosphate
  modified_base 10: mod_base = OTHER; note = 2'-deoxy-2'-fluoroadenosine-3'-phosphate
  modified_base 11: mod_base = OTHER; note = 2'-deoxy-2'-fluoroguanosine-3'-phosphate
  modified_base 12: mod_base = OTHER; note = 2'-O-methylcytidine-3'-phosphate
  modified_base 13: mod_base = OTHER; note = 2'-O-methyladenosine-3'-phosphate
  modified_base 14: mod_base = OTHER; note = 2'-O-methyladenosine-3'-phosphate
  modified_base 15: mod_base = OTHER; note = 2'-O-methylcytidine-3'-phosphate
  modified_base 16: mod_base = OTHER; note = 2'-O-methylguanosine-3'-phosphate
  modified_base 17: mod_base = OTHER; note = 2'-O-methyluridine-3'-phosphate
  modified_base 18: mod_base = OTHER; note = 2'-O-methylcytidine-3'-phosphate
  modified_base 19: mod_base = OTHER; note = 2'-O-methylcytidine-3'-phosphate
  modified_base 20: mod_base = OTHER; note = 2'-O-methyladenosine-3'-phosphate
  modified_base 21: mod_base = OTHER; note = 2'-O-methyladenosine-3'-phosphate ((2S,4R)-1-[29-[[2-(acetylamino)-2-deoxy-beta-D-galactopyra nosyl]oxy]-14,14-bis[[3-[[3-[[5-[[2-(acetylamino)-2-deoxy-b eta-D-galactopyranosyl]oxy]-1-oxopentyl]amino]propyl]amino] -3-oxopropoxy]methyl]-1,12,19,25-tetraoxo-16-oxa-13,20,24-t riazanonacos-1-yl]-4-hydroxy-2-pyrrolidinyl)methyl ester
ctggatcttagcaacgtccaa

SEQ ID NO: 192 - RNA, 21 nt, synthetic construct
  source 1..21: mol_type = other RNA
  modified_base 1: mod_base = OTHER; note = 2'-O-methyluridine-3'-phosphorothioate
  modified_base 2: mod_base = OTHER; note = 2'-O-methylguanosine-3'-phosphorothioate
  modified_base 3: mod_base = OTHER; note = 2'-O-methylguanosine-3'-phosphate
  modified_base 4: mod_base = OTHER; note = 2'-O-methyladenosine-3'-phosphate
  modified_base 5: mod_base = OTHER; note = 2'-O-methyluridine-3'-phosphate
  modified_base 6: mod_base = OTHER; note = 2'-O-hexadecyl-cytidine-3'-phosphate
  modified_base 7: mod_base = OTHER; note = 2'-O-methyluridine-3'-phosphate
  modified_base 8: mod_base = OTHER; note = 2'-O-methyluridine-3'-phosphate
  modified_base 9: mod_base = OTHER; note = 2'-deoxy-2'-fluoroadenosine-3'-phosphate
  modified_base 10: mod_base = OTHER; note = 2'-deoxy-2'-fluoroguanosine-3'-phosphate
  modified_base 11: mod_base = OTHER; note = 2'-deoxy-2'-fluorocytidine-3'-phosphate
  modified_base 12: mod_base = OTHER; note = 2'-O-methyladenosine-3'-phosphate
  modified_base 13: mod_base = OTHER; note = 2'-O-methyladenosine-3'-phosphate
  modified_base 14: mod_base = OTHER; note = 2'-O-methylcytidine-3'-phosphate
  modified_base 15: mod_base = OTHER; note = 2'-O-methylguanosine-3'-phosphate
  modified_base 16: mod_base = OTHER; note = 2'-O-methyluridine-3'-phosphate
  modified_base 17: mod_base = OTHER; note = 2'-O-methylcytidine-3'-phosphate
  modified_base 18: mod_base = OTHER; note = 2'-O-methylcytidine-3'-phosphate
  modified_base 19: mod_base = OTHER; note = 2'-O-methyladenosine-3'-phosphate
  modified_base 20: mod_base = OTHER; note = 2'-O-methylguanosine-3'-phosphate
  modified_base 21: mod_base = OTHER; note = 2'-O-methyladenosine-3'-phosphate ((2S,4R)-1-[29-[[2-(acetylamino)-2-deoxy-beta-D-galactopyra nosyl]oxy]-14,14-bis[[3-[[3-[[5-[[2-(acetylamino)-2-deoxy-b eta-D-galactopyranosyl]oxy]-1-oxopentyl]amino]propyl]amino] -3-oxopropoxy]methyl]-1,12,19,25-tetraoxo-16-oxa-13,20,24-t riazanonacos-1-yl]-4-hydroxy-2-pyrrolidinyl)methyl ester
tggatcttagcaacgtccaga

SEQ ID NO: 193 - RNA, 21 nt, synthetic construct
  source 1..21: mol_type = other RNA
  modified_base 1: mod_base = OTHER; note = 2'-O-methylguanosine-3'-phosphorothioate
  modified_base 2: mod_base = OTHER; note = 2'-O-methylguanosine-3'-phosphorothioate
  modified_base 3: mod_base = OTHER; note = 2'-O-methyladenosine-3'-phosphate
  modified_base 4: mod_base = OTHER; note = 2'-O-methyluridine-3'-phosphate
  modified_base 5: mod_base = OTHER; note = 2'-O-methylcytidine-3'-phosphate
  modified_base 6: mod_base = OTHER; note = 2'-O-hexadecyl-uridine-3'-phosphate
  modified_base 7: mod_base = OTHER; note = 2'-O-methyluridine-3'-phosphate
  modified_base 8: mod_base = OTHER; note = 2'-O-methyladenosine-3'-phosphate
  modified_base 9: mod_base = OTHER; note = 2'-deoxy-2'-fluoroguanosine-3'-phosphate
  modified_base 10: mod_base = OTHER; note = 2'-deoxy-2'-fluorocytidine-3'-phosphate
  modified_base 11: mod_base = OTHER; note = 2'-deoxy-2'-fluoroadenosine-3'-phosphate
  modified_base 12: mod_base = OTHER; note = 2'-O-methyladenosine-3'-phosphate
  modified_base 13: mod_base = OTHER; note = 2'-O-methylcytidine-3'-phosphate
  modified_base 14: mod_base = OTHER; note = 2'-O-methylguanosine-3'-phosphate
  modified_base 15: mod_base = OTHER; note = 2'-O-methyluridine-3'-phosphate
  modified_base 16: mod_base = OTHER; note = 2'-O-methylcytidine-3'-phosphate
  modified_base 17: mod_base = OTHER; note = 2'-O-methylcytidine-3'-phosphate
  modified_base 18: mod_base = OTHER; note = 2'-O-methyladenosine-3'-phosphate
  modified_base 19: mod_base = OTHER; note = 2'-O-methylguanosine-3'-phosphate
  modified_base 20: mod_base = OTHER; note = 2'-O-methyluridine-3'-phosphate
  modified_base 21: mod_base = OTHER; note = 2'-O-methyladenosine-3'-phosphate ((2S,4R)-1-[29-[[2-(acetylamino)-2-deoxy-beta-D-galactopyra nosyl]oxy]-14,14-bis[[3-[[3-[[5-[[2-(acetylamino)-2-deoxy-b eta-D-galactopyranosyl]oxy]-1-oxopentyl]amino]propyl]amino] -3-oxopropoxy]methyl]-1,12,19,25-tetraoxo-16-oxa-13,20,24-t riazanonacos-1-yl]-4-hydroxy-2-pyrrolidinyl)methyl ester
ggatcttagcaacgtccagta

SEQ ID NO: 194 - RNA, 21 nt, synthetic construct
  source 1..21: mol_type = other RNA
  modified_base 1: mod_base = OTHER; note = 2'-O-methylguanosine-3'-phosphorothioate
  modified_base 2: mod_base = OTHER; note = 2'-O-methyladenosine-3'-phosphorothioate
  modified_base 3: mod_base = OTHER; note = 2'-O-methyluridine-3'-phosphate
  modified_base 4: mod_base = OTHER; note = 2'-O-methylcytidine-3'-phosphate
  modified_base 5: mod_base = OTHER; note = 2'-O-methyluridine-3'-phosphate
  modified_base 6: mod_base = OTHER; note = 2'-O-hexadecyl-uridine-3'-phosphate
  modified_base 7: mod_base = OTHER; note = 2'-O-methyladenosine-3'-phosphate
  modified_base 8: mod_base = OTHER; note = 2'-O-methylguanosine-3'-phosphate
  modified_base 9: mod_base = OTHER; note = 2'-deoxy-2'-fluorocytidine-3'-phosphate
  modified_base 10: mod_base = OTHER; note = 2'-deoxy-2'-fluoroadenosine-3'-phosphate
  modified_base 11: mod_base = OTHER; note = 2'-deoxy-2'-fluoroadenosine-3'-phosphate
  modified_base 12: mod_base = OTHER; note = 2'-O-methylcytidine-3'-phosphate
  modified_base 13: mod_base = OTHER; note = 2'-O-methylguanosine-3'-phosphate
  modified_base 14: mod_base = OTHER; note = 2'-O-methyluridine-3'-phosphate
  modified_base 15: mod_base = OTHER; note = 2'-O-methylcytidine-3'-phosphate
  modified_base 16: mod_base = OTHER; note = 2'-O-methylcytidine-3'-phosphate
  modified_base 17: mod_base = OTHER; note = 2'-O-methyladenosine-3'-phosphate
  modified_base 18: mod_base = OTHER; note = 2'-O-methylguanosine-3'-phosphate
  modified_base 19: mod_base = OTHER; note = 2'-O-methyluridine-3'-phosphate
  modified_base 20: mod_base = OTHER; note = 2'-O-methylcytidine-3'-phosphate
  modified_base 21: mod_base = OTHER; note = 2'-O-methyladenosine-3'-phosphate ((2S,4R)-1-[29-[[2-(acetylamino)-2-deoxy-beta-D-galactopyra nosyl]oxy]-14,14-bis[[3-[[3-[[5-[[2-(acetylamino)-2-deoxy-b eta-D-galactopyranosyl]oxy]-1-oxopentyl]amino]propyl]amino] -3-oxopropoxy]methyl]-1,12,19,25-tetraoxo-16-oxa-13,20,24-t riazanonacos-1-yl]-4-hydroxy-2-pyrrolidinyl)methyl ester
gatcttagcaacgtccagtca

SEQ ID NO: 195 - RNA, 21 nt, synthetic construct
  source 1..21: mol_type = other RNA
  modified_base 1: mod_base = OTHER; note = 2'-O-methyladenosine-3'-phosphorothioate
  modified_base 2: mod_base = OTHER; note = 2'-O-methyluridine-3'-phosphorothioate
  modified_base 3: mod_base = OTHER; note = 2'-O-methylcytidine-3'-phosphate
  modified_base 4: mod_base = OTHER; note = 2'-O-methyluridine-3'-phosphate
  modified_base 5: mod_base = OTHER; note = 2'-O-methyluridine-3'-phosphate
  modified_base 6: mod_base = OTHER; note = 2'-O-hexadecyl-adenosine-3'-phosphate
  modified_base 7: mod_base = OTHER; note = 2'-O-methylguanosine-3'-phosphate
  modified_base 8: mod_base = OTHER; note = 2'-O-methylcytidine-3'-phosphate
  modified_base 9: mod_base = OTHER; note = 2'-deoxy-2'-fluoroadenosine-3'-phosphate
  modified_base 10: mod_base = OTHER; note = 2'-deoxy-2'-fluoroadenosine-3'-phosphate
  modified_base 11: mod_base = OTHER; note = 2'-deoxy-2'-fluorocytidine-3'-phosphate
  modified_base 12: mod_base = OTHER; note = 2'-O-methylguanosine-3'-phosphate
  modified_base 13: mod_base = OTHER; note = 2'-O-methyluridine-3'-phosphate
  modified_base 14: mod_base = OTHER; note = 2'-O-methylcytidine-3'-phosphate
  modified_base 15: mod_base = OTHER; note = 2'-O-methylcytidine-3'-phosphate
  modified_base 16: mod_base = OTHER; note = 2'-O-methyladenosine-3'-phosphate
  modified_base 17: mod_base = OTHER; note = 2'-O-methylguanosine-3'-phosphate
  modified_base 18: mod_base = OTHER; note = 2'-O-methyluridine-3'-phosphate
  modified_base 19: mod_base = OTHER; note = 2'-O-methylcytidine-3'-phosphate
  modified_base 20: mod_base = OTHER; note = 2'-O-methylcytidine-3'-phosphate
  modified_base 21: mod_base = OTHER; note = 2'-O-methyladenosine-3'-phosphate ((2S,4R)-1-[29-[[2-(acetylamino)-2-deoxy-beta-D-galactopyra nosyl]oxy]-14,14-bis[[3-[[3-[[5-[[2-(acetylamino)-2-deoxy-b eta-D-galactopyranosyl]oxy]-1-oxopentyl]amino]propyl]amino] -3-oxopropoxy]methyl]-1,12,19,25-tetraoxo-16-oxa-13,20,24-t riazanonacos-1-yl]-4-hydroxy-2-pyrrolidinyl)methyl ester
atcttagcaacgtccagtcca

SEQ ID NO: 196 - RNA, 21 nt, synthetic construct
  source 1..21: mol_type = other RNA
  modified_base 1: mod_base = OTHER; note = 2'-O-methyluridine-3'-phosphorothioate
  modified_base 2: mod_base = OTHER; note = 2'-O-methylcytidine-3'-phosphorothioate
  modified_base 3: mod_base = OTHER; note = 2'-O-methyluridine-3'-phosphate
  modified_base 4: mod_base = OTHER; note = 2'-O-methyluridine-3'-phosphate
  modified_base 5: mod_base = OTHER; note = 2'-O-methyladenosine-3'-phosphate
  modified_base 6: mod_base = OTHER; note = 2'-O-hexadecyl-guanosine-3'-phosphate
  modified_base 7: mod_base = OTHER; note = 2'-O-methylcytidine-3'-phosphate
  modified_base 8: mod_base = OTHER; note = 2'-O-methyladenosine-3'-phosphate
  modified_base 9: mod_base = OTHER; note = 2'-deoxy-2'-fluoroadenosine-3'-phosphate
  modified_base 10: mod_base = OTHER; note = 2'-deoxy-2'-fluorocytidine-3'-phosphate
  modified_base 11: mod_base = OTHER; note = 2'-deoxy-2'-fluoroguanosine-3'-phosphate
  modified_base 12: mod_base = OTHER; note = 2'-O-methyluridine-3'-phosphate
  modified_base 13: mod_base = OTHER; note = 2'-O-methylcytidine-3'-phosphate
  modified_base 14: mod_base = OTHER; note = 2'-O-methylcytidine-3'-phosphate
  modified_base 15: mod_base = OTHER; note = 2'-O-methyladenosine-3'-phosphate
  modified_base 16: mod_base = OTHER; note = 2'-O-methylguanosine-3'-phosphate
  modified_base 17: mod_base = OTHER; note = 2'-O-methyluridine-3'-phosphate
  modified_base 18: mod_base = OTHER; note = 2'-O-methylcytidine-3'-phosphate
  modified_base 19: mod_base = OTHER; note = 2'-O-methylcytidine-3'-phosphate
  modified_base 20: mod_base = OTHER; note = 2'-O-methyladenosine-3'-phosphate
  modified_base 21: mod_base = OTHER; note = 2'-O-methyladenosine-3'-phosphate ((2S,4R)-1-[29-[[2-(acetylamino)-2-deoxy-beta-D-galactopyra nosyl]oxy]-14,14-bis[[3-[[3-[[5-[[2-(acetylamino)-2-deoxy-b eta-D-galactopyranosyl]oxy]-1-oxopentyl]amino]propyl]amino] -3-oxopropoxy]methyl]-1,12,19,25-tetraoxo-16-oxa-13,20,24-t riazanonacos-1-yl]-4-hydroxy-2-pyrrolidinyl)methyl ester
tcttagcaacgtccagtccaa

SEQ ID NO: 197 - RNA, 21 nt, synthetic construct
  source 1..21: mol_type = other RNA
  modified_base 1: mod_base = OTHER; note = 2'-O-methylcytidine-3'-phosphorothioate
  modified_base 2: mod_base = OTHER; note = 2'-O-methyluridine-3'-phosphorothioate
  modified_base 3: mod_base = OTHER; note = 2'-O-methyluridine-3'-phosphate
  modified_base 4: mod_base = OTHER; note = 2'-O-methyladenosine-3'-phosphate
  modified_base 5: mod_base = OTHER; note = 2'-O-methylguanosine-3'-phosphate
  modified_base 6: mod_base = OTHER; note = 2'-O-hexadecyl-cytidine-3'-phosphate
  modified_base 7: mod_base = OTHER; note = 2'-O-methyladenosine-3'-phosphate
  modified_base 8: mod_base = OTHER; note = 2'-O-methyladenosine-3'-phosphate
  modified_base 9: mod_base = OTHER; note = 2'-deoxy-2'-fluorocytidine-3'-phosphate
  modified_base 10: mod_base = OTHER; note = 2'-deoxy-2'-fluoroguanosine-3'-phosphate
  modified_base 11: mod_base = OTHER; note = 2'-deoxy-2'-fluorouridine-3'-phosphate
  modified_base 12: mod_base = OTHER; note = 2'-O-methylcytidine-3'-phosphate
  modified_base 13: mod_base = OTHER; note = 2'-O-methylcytidine-3'-phosphate
  modified_base 14: mod_base = OTHER; note = 2'-O-methyladenosine-3'-phosphate
  modified_base 15: mod_base = OTHER; note = 2'-O-methylguanosine-3'-phosphate
  modified_base 16: mod_base = OTHER; note = 2'-O-methyluridine-3'-phosphate
  modified_base 17: mod_base = OTHER; note = 2'-O-methylcytidine-3'-phosphate
  modified_base 18: mod_base = OTHER; note = 2'-O-methylcytidine-3'-phosphate
  modified_base 19: mod_base = OTHER; note = 2'-O-methyladenosine-3'-phosphate
  modified_base 20: mod_base = OTHER; note = 2'-O-methyladenosine-3'-phosphate
  modified_base 21: mod_base = OTHER; note = 2'-O-methyladenosine-3'-phosphate ((2S,4R)-1-[29-[[2-(acetylamino)-2-deoxy-beta-D-galactopyra nosyl]oxy]-14,14-bis[[3-[[3-[[5-[[2-(acetylamino)-2-deoxy-b eta-D-galactopyranosyl]oxy]-1-oxopentyl]amino]propyl]amino] -3-oxopropoxy]methyl]-1,12,19,25-tetraoxo-16-oxa-13,20,24-t riazanonacos-1-yl]-4-hydroxy-2-pyrrolidinyl)methyl ester
cttagcaacgtccagtccaaa

SEQ ID NO: 198 - RNA, 21 nt, synthetic construct
  source 1..21: mol_type = other RNA
  modified_base 1: mod_base = OTHER; note = 2'-O-methyluridine-3'-phosphorothioate
  modified_base 2: mod_base = OTHER; note = 2'-O-methyluridine-3'-phosphorothioate
  modified_base 3: mod_base = OTHER; note = 2'-O-methyladenosine-3'-phosphate
  modified_base 4: mod_base = OTHER; note = 2'-O-methylguanosine-3'-phosphate
  modified_base 5: mod_base = OTHER; note = 2'-O-methylcytidine-3'-phosphate
  modified_base 6: mod_base = OTHER; note = 2'-O-hexadecyl-adenosine-3'-phosphate
  modified_base 7: mod_base = OTHER; note = 2'-O-methyladenosine-3'-phosphate
  modified_base 8: mod_base = OTHER; note = 2'-O-methylcytidine-3'-phosphate
  modified_base 9: mod_base = OTHER; note = 2'-deoxy-2'-fluoroguanosine-3'-phosphate
  modified_base 10: mod_base = OTHER; note = 2'-deoxy-2'-fluorouridine-3'-phosphate
  modified_base 11: mod_base = OTHER; note = 2'-deoxy-2'-fluorocytidine-3'-phosphate
  modified_base 12: mod_base = OTHER; note = 2'-O-methylcytidine-3'-phosphate
  modified_base 13: mod_base = OTHER; note = 2'-O-methyladenosine-3'-phosphate
  modified_base 14: mod_base = OTHER; note = 2'-O-methylguanosine-3'-phosphate
  modified_base 15: mod_base = OTHER; note = 2'-O-methyluridine-3'-phosphate
  modified_base 16: mod_base = OTHER; note = 2'-O-methylcytidine-3'-phosphate
  modified_base 17: mod_base = OTHER; note = 2'-O-methylcytidine-3'-phosphate
  modified_base 18: mod_base = OTHER; note = 2'-O-methyladenosine-3'-phosphate
  modified_base 19: mod_base = OTHER; note = 2'-O-methyladenosine-3'-phosphate
  modified_base 20: mod_base = OTHER; note = 2'-O-methylguanosine-3'-phosphate
  modified_base 21: mod_base = OTHER; note = 2'-O-methyladenosine-3'-phosphate ((2S,4R)-1-[29-[[2-(acetylamino)-2-deoxy-beta-D-galactopyra nosyl]oxy]-14,14-bis[[3-[[3-[[5-[[2-(acetylamino)-2-deoxy-b eta-D-galactopyranosyl]oxy]-1-oxopentyl]amino]propyl]amino] -3-oxopropoxy]methyl]-1,12,19,25-tetraoxo-16-oxa-13,20,24-t riazanonacos-1-yl]-4-hydroxy-2-pyrrolidinyl)methyl ester
ttagcaacgtccagtccaaga

SEQ ID NO: 199 - RNA, 21 nt, synthetic construct
  source 1..21: mol_type = other RNA
  modified_base 1: mod_base = OTHER; note = 2'-O-methyluridine-3'-phosphorothioate
  modified_base 2: mod_base = OTHER; note = 2'-O-methyladenosine-3'-phosphorothioate
  modified_base 3: mod_base = OTHER; note = 2'-O-methylguanosine-3'-phosphate
  modified_base 4: mod_base = OTHER; note = 2'-O-methylcytidine-3'-phosphate
  modified_base 5: mod_base = OTHER; note = 2'-O-methyladenosine-3'-phosphate
  modified_base 6: mod_base = OTHER; note = 2'-O-hexadecyl-adenosine-3'-phosphate
  modified_base 7: mod_base = OTHER; note = 2'-O-methylcytidine-3'-phosphate
  modified_base 8: mod_base = OTHER; note = 2'-O-methylguanosine-3'-phosphate
  modified_base 9: mod_base = OTHER; note = 2'-deoxy-2'-fluorouridine-3'-phosphate
  modified_base 10: mod_base = OTHER; note = 2'-deoxy-2'-fluorocytidine-3'-phosphate
  modified_base 11: mod_base = OTHER; note = 2'-deoxy-2'-fluorocytidine-3'-phosphate
  modified_base 12: mod_base = OTHER; note = 2'-O-methyladenosine-3'-phosphate
  modified_base 13: mod_base = OTHER; note = 2'-O-methylguanosine-3'-phosphate
  modified_base 14: mod_base = OTHER; note = 2'-O-methyluridine-3'-phosphate
  modified_base 15: mod_base = OTHER; note = 2'-O-methylcytidine-3'-phosphate
  modified_base 16: mod_base = OTHER; note = 2'-O-methylcytidine-3'-phosphate
  modified_base 17: mod_base = OTHER; note = 2'-O-methyladenosine-3'-phosphate
  modified_base 18: mod_base = OTHER; note = 2'-O-methyladenosine-3'-phosphate
  modified_base 19: mod_base = OTHER; note = 2'-O-methylguanosine-3'-phosphate
  modified_base 20: mod_base = OTHER; note = 2'-O-methyluridine-3'-phosphate
  modified_base 21: mod_base = OTHER; note = 2'-O-methyladenosine-3'-phosphate ((2S,4R)-1-[29-[[2-(acetylamino)-2-deoxy-beta-D-galactopyra nosyl]oxy]-14,14-bis[[3-[[3-[[5-[[2-(acetylamino)-2-deoxy-b eta-D-galactopyranosyl]oxy]-1-oxopentyl]amino]propyl]amino] -3-oxopropoxy]methyl]-1,12,19,25-tetraoxo-16-oxa-13,20,24-t riazanonacos-1-yl]-4-hydroxy-2-pyrrolidinyl)methyl ester
tagcaacgtccagtccaagta

SEQ ID NO: 200 - RNA, 21 nt, synthetic construct
  source 1..21: mol_type = other RNA
  modified_base 1: mod_base = OTHER; note = 2'-O-methyladenosine-3'-phosphorothioate
  modified_base 2: mod_base = OTHER; note = 2'-O-methylguanosine-3'-phosphorothioate
  modified_base 3: mod_base = OTHER; note = 2'-O-methylcytidine-3'-phosphate
  modified_base 4: mod_base = OTHER; note = 2'-O-methyladenosine-3'-phosphate
  modified_base 5: mod_base = OTHER; note = 2'-O-methyladenosine-3'-phosphate
  modified_base 6: mod_base = OTHER; note = 2'-O-hexadecyl-cytidine-3'-phosphate
  modified_base 7: mod_base = OTHER; note = 2'-O-methylguanosine-3'-phosphate
  modified_base 8: mod_base = OTHER; note = 2'-O-methyluridine-3'-phosphate
  modified_base 9: mod_base = OTHER; note = 2'-deoxy-2'-fluorocytidine-3'-phosphate
  modified_base 10: mod_base = OTHER; note = 2'-deoxy-2'-fluorocytidine-3'-phosphate
  modified_base 11: mod_base = OTHER; note = 2'-deoxy-2'-fluoroadenosine-3'-phosphate
  modified_base 12: mod_base = OTHER; note = 2'-O-methylguanosine-3'-phosphate
  modified_base 13: mod_base = OTHER; note = 2'-O-methyluridine-3'-phosphate
  modified_base 14: mod_base = OTHER; note = 2'-O-methylcytidine-3'-phosphate
  modified_base 15: mod_base = OTHER; note = 2'-O-methylcytidine-3'-phosphate
  modified_base 16: mod_base = OTHER; note = 2'-O-methyladenosine-3'-phosphate
  modified_base 17: mod_base = OTHER; note = 2'-O-methyladenosine-3'-phosphate
  modified_base 18: mod_base = OTHER; note = 2'-O-methylguanosine-3'-phosphate
  modified_base 19: mod_base = OTHER; note = 2'-O-methyluridine-3'-phosphate
  modified_base 20: mod_base = OTHER; note = 2'-O-methylguanosine-3'-phosphate
  modified_base 21: mod_base = OTHER; note = 2'-O-methyladenosine-3'-phosphate ((2S,4R)-1-[29-[[2-(acetylamino)-2-deoxy-beta-D-galactopyra nosyl]oxy]-14,14-bis[[3-[[3-[[5-[[2-(acetylamino)-2-deoxy-b eta-D-galactopyranosyl]oxy]-1-oxopentyl]amino]propyl]amino] -3-oxopropoxy]methyl]-1,12,19,25-tetraoxo-16-oxa-13,20,24-t riazanonacos-1-yl]-4-hydroxy-2-pyrrolidinyl)methyl ester
agcaacgtccagtccaagtga

SEQ ID NO: 201 - RNA, 21 nt, synthetic construct
  source 1..21: mol_type = other RNA
  modified_base 1: mod_base = OTHER; note = 2'-O-methylguanosine-3'-phosphorothioate
  modified_base 2: mod_base = OTHER; note = 2'-O-methylcytidine-3'-phosphorothioate
  modified_base 3: mod_base = OTHER; note = 2'-O-methyladenosine-3'-phosphate
  modified_base 4: mod_base = OTHER; note = 2'-O-methyladenosine-3'-phosphate
  modified_base 5: mod_base = OTHER; note = 2'-O-methylcytidine-3'-phosphate
  modified_base 6: mod_base = OTHER; note = 2'-O-hexadecyl-guanosine-3'-phosphate
  modified_base 7: mod_base = OTHER; note = 2'-O-methyluridine-3'-phosphate
  modified_base 8: mod_base = OTHER; note = 2'-O-methylcytidine-3'-phosphate
  modified_base 9: mod_base = OTHER; note = 2'-deoxy-2'-fluorocytidine-3'-phosphate
  modified_base 10: mod_base = OTHER; note = 2'-deoxy-2'-fluoroadenosine-3'-phosphate
  modified_base 11: mod_base = OTHER; note = 2'-deoxy-2'-fluoroguanosine-3'-phosphate
  modified_base 12: mod_base = OTHER; note = 2'-O-methyluridine-3'-phosphate
  modified_base 13: mod_base = OTHER; note = 2'-O-methylcytidine-3'-phosphate
  modified_base 14: mod_base = OTHER; note = 2'-O-methylcytidine-3'-phosphate
  modified_base 15: mod_base = OTHER; note = 2'-O-methyladenosine-3'-phosphate
  modified_base 16: mod_base = OTHER; note = 2'-O-methyladenosine-3'-phosphate
  modified_base 17: mod_base = OTHER; note = 2'-O-methylguanosine-3'-phosphate
  modified_base 18: mod_base = OTHER; note = 2'-O-methyluridine-3'-phosphate
  modified_base 19: mod_base = OTHER; note = 2'-O-methylguanosine-3'-phosphate
  modified_base 20: mod_base = OTHER; note = 2'-O-methyluridine-3'-phosphate
  modified_base 21: mod_base = OTHER; note = 2'-O-methyladenosine-3'-phosphate ((2S,4R)-1-[29-[[2-(acetylamino)-2-deoxy-beta-D-galactopyra nosyl]oxy]-14,14-bis[[3-[[3-[[5-[[2-(acetylamino)-2-deoxy-b eta-D-galactopyranosyl]oxy]-1-oxopentyl]amino]propyl]amino] -3-oxopropoxy]methyl]-1,12,19,25-tetraoxo-16-oxa-13,20,24-t riazanonacos-1-yl]-4-hydroxy-2-pyrrolidinyl)methyl ester
gcaacgtccagtccaagtgta

SEQ ID NO: 202 - RNA, 21 nt, synthetic construct
  source 1..21: mol_type = other RNA
  modified_base 1: mod_base = OTHER; note = 2'-O-methylcytidine-3'-phosphorothioate
  modified_base 2: mod_base = OTHER; note = 2'-O-methyladenosine-3'-phosphorothioate
  modified_base 3: mod_base = OTHER; note = 2'-O-methyladenosine-3'-phosphate
  modified_base 4: mod_base = OTHER; note = 2'-O-methylcytidine-3'-phosphate
  modified_base 5: mod_base = OTHER; note = 2'-O-methylguanosine-3'-phosphate
  modified_base 6: mod_base = OTHER; note = 2'-O-hexadecyl-uridine-3'-phosphate
  modified_base 7: mod_base = OTHER; note = 2'-O-methylcytidine-3'-phosphate
  modified_base 8: mod_base = OTHER; note = 2'-O-methylcytidine-3'-phosphate
  modified_base 9: mod_base = OTHER; note = 2'-deoxy-2'-fluoroadenosine-3'-phosphate
  modified_base 10: mod_base = OTHER; note = 2'-deoxy-2'-fluoroguanosine-3'-phosphate
  modified_base 11: mod_base = OTHER; note = 2'-deoxy-2'-fluorouridine-3'-phosphate
  modified_base 12: mod_base = OTHER; note = 2'-O-methylcytidine-3'-phosphate
  modified_base 13: mod_base = OTHER; note = 2'-O-methylcytidine-3'-phosphate
  modified_base 14: mod_base = OTHER; note = 2'-O-methyladenosine-3'-phosphate
  modified_base 15: mod_base = OTHER; note = 2'-O-methyladenosine-3'-phosphate
  modified_base 16: mod_base = OTHER; note = 2'-O-methylguanosine-3'-phosphate
  modified_base 17: mod_base = OTHER; note = 2'-O-methyluridine-3'-phosphate
  modified_base 18: mod_base = OTHER; note = 2'-O-methylguanosine-3'-phosphate
  modified_base 19: mod_base = OTHER; note = 2'-O-methyluridine-3'-phosphate
  modified_base 20: mod_base = OTHER; note = 2'-O-methylguanosine-3'-phosphate
  modified_base 21: mod_base = OTHER; note = 2'-O-methyladenosine-3'-phosphate ((2S,4R)-1-[29-[[2-(acetylamino)-2-deoxy-beta-D-galactopyra nosyl]oxy]-14,14-bis[[3-[[3-[[5-[[2-(acetylamino)-2-deoxy-b eta-D-galactopyranosyl]oxy]-1-oxopentyl]amino]propyl]amino] -3-oxopropoxy]methyl]-1,12,19,25-tetraoxo-16-oxa-13,20,24-t riazanonacos-1-yl]-4-hydroxy-2-pyrrolidinyl)methyl ester
caacgtccagtccaagtgtga

SEQ ID NO: 203 - RNA, 21 nt, synthetic construct
  source 1..21: mol_type = other RNA
  modified_base 1: mod_base = OTHER; note = 2'-O-methyladenosine-3'-phosphorothioate
  modified_base 2: mod_base = OTHER; note = 2'-O-methyladenosine-3'-phosphorothioate
  modified_base 3: mod_base = OTHER; note = 2'-O-methylcytidine-3'-phosphate
  modified_base 4: mod_base = OTHER; note = 2'-O-methylguanosine-3'-phosphate
  modified_base 5: mod_base = OTHER; note = 2'-O-methyluridine-3'-phosphate
  modified_base 6: mod_base = OTHER; note = 2'-O-hexadecyl-cytidine-3'-phosphate
  modified_base 7: mod_base = OTHER; note = 2'-O-methylcytidine-3'-phosphate
  modified_base 8: mod_base = OTHER; note = 2'-O-methyladenosine-3'-phosphate
  modified_base 9: mod_base = OTHER; note = 2'-deoxy-2'-fluoroguanosine-3'-phosphate
  modified_base 10: mod_base = OTHER; note = 2'-deoxy-2'-fluorouridine-3'-phosphate
  modified_base 11: mod_base = OTHER; note = 2'-deoxy-2'-fluorocytidine-3'-phosphate
  modified_base 12: mod_base = OTHER; note = 2'-O-methylcytidine-3'-phosphate
  modified_base 13: mod_base = OTHER; note = 2'-O-methyladenosine-3'-phosphate
  modified_base 14: mod_base = OTHER; note = 2'-O-methyladenosine-3'-phosphate
  modified_base 15: mod_base = OTHER; note = 2'-O-methylguanosine-3'-phosphate
  modified_base 16: mod_base = OTHER; note = 2'-O-methyluridine-3'-phosphate
  modified_base 17: mod_base = OTHER; note = 2'-O-methylguanosine-3'-phosphate
  modified_base 18: mod_base = OTHER; note = 2'-O-methyluridine-3'-phosphate
  modified_base 19: mod_base = OTHER; note = 2'-O-methylguanosine-3'-phosphate
  modified_base 20: mod_base = OTHER; note = 2'-O-methylguanosine-3'-phosphate
  modified_base 21: mod_base = OTHER; note = 2'-O-methyladenosine-3'-phosphate ((2S,4R)-1-[29-[[2-(acetylamino)-2-deoxy-beta-D-galactopyra nosyl]oxy]-14,14-bis[[3-[[3-[[5-[[2-(acetylamino)-2-deoxy-b eta-D-galactopyranosyl]oxy]-1-oxopentyl]amino]propyl]amino] -3-oxopropoxy]methyl]-1,12,19,25-tetraoxo-16-oxa-13,20,24-t riazanonacos-1-yl]-4-hydroxy-2-pyrrolidinyl)methyl ester
aacgtccagtccaagtgtgga

SEQ ID NO: 204 - RNA, 21 nt, synthetic construct
  source 1..21: mol_type = other RNA
  modified_base 1: mod_base = OTHER; note = 2'-O-methyladenosine-3'-phosphorothioate
  modified_base 2: mod_base = OTHER; note = 2'-O-methylcytidine-3'-phosphorothioate
  modified_base 3: mod_base = OTHER; note = 2'-O-methylguanosine-3'-phosphate
  modified_base 4: mod_base = OTHER; note = 2'-O-methyluridine-3'-phosphate
  modified_base 5: mod_base = OTHER; note = 2'-O-methylcytidine-3'-phosphate
  modified_base 6: mod_base = OTHER; note = 2'-O-hexadecyl-cytidine-3'-phosphate
  modified_base 7: mod_base = OTHER; note = 2'-O-methyladenosine-3'-phosphate
  modified_base 8: mod_base = OTHER; note = 2'-O-methylguanosine-3'-phosphate
  modified_base 9: mod_base = OTHER; note = 2'-deoxy-2'-fluorouridine-3'-phosphate
  modified_base 10: mod_base = OTHER; note = 2'-deoxy-2'-fluorocytidine-3'-phosphate
  modified_base 11: mod_base = OTHER; note = 2'-deoxy-2'-fluorocytidine-3'-phosphate
  modified_base 12: mod_base = OTHER; note = 2'-O-methyladenosine-3'-phosphate
  modified_base 13: mod_base = OTHER; note = 2'-O-methyladenosine-3'-phosphate
  modified_base 14: mod_base = OTHER; note = 2'-O-methylguanosine-3'-phosphate
  modified_base 15: mod_base = OTHER; note = 2'-O-methyluridine-3'-phosphate
  modified_base 16: mod_base = OTHER; note = 2'-O-methylguanosine-3'-phosphate
  modified_base 17: mod_base = OTHER; note = 2'-O-methyluridine-3'-phosphate
  modified_base 18: mod_base = OTHER; note = 2'-O-methylguanosine-3'-phosphate
  modified_base 19: mod_base = OTHER; note = 2'-O-methylguanosine-3'-phosphate
  modified_base 20: mod_base = OTHER; note = 2'-O-methylcytidine-3'-phosphate
  modified_base 21: mod_base = OTHER; note = 2'-O-methyladenosine-3'-phosphate ((2S,4R)-1-[29-[[2-(acetylamino)-2-deoxy-beta-D-galactopyra nosyl]oxy]-14,14-bis[[3-[[3-[[5-[[2-(acetylamino)-2-deoxy-b eta-D-galactopyranosyl]oxy]-1-oxopentyl]amino]propyl]amino] -3-oxopropoxy]methyl]-1,12,19,25-tetraoxo-16-oxa-13,20,24-t riazanonacos-1-yl]-4-hydroxy-2-pyrrolidinyl)methyl ester
acgtccagtccaagtgtggca

SEQ ID NO: 205 - RNA, 21 nt, synthetic construct
  source 1..21: mol_type = other RNA
  modified_base 1: mod_base = OTHER; note = 2'-O-methylcytidine-3'-phosphorothioate
  modified_base 2: mod_base = OTHER; note = 2'-O-methylguanosine-3'-phosphorothioate
  modified_base 3: mod_base = OTHER; note = 2'-O-methyluridine-3'-phosphate
  modified_base 4: mod_base = OTHER; note = 2'-O-methylcytidine-3'-phosphate
  modified_base 5: mod_base = OTHER; note = 2'-O-methylcytidine-3'-phosphate
  modified_base 6: mod_base = OTHER; note = 2'-O-hexadecyl-adenosine-3'-phosphate
  modified_base 7: mod_base = OTHER; note = 2'-O-methylguanosine-3'-phosphate
  modified_base 8: mod_base = OTHER; note = 2'-O-methyluridine-3'-phosphate
  modified_base 9: mod_base = OTHER; note = 2'-deoxy-2'-fluorocytidine-3'-phosphate
  modified_base 10: mod_base = OTHER; note = 2'-deoxy-2'-fluorocytidine-3'-phosphate
  modified_base 11: mod_base = OTHER; note = 2'-deoxy-2'-fluoroadenosine-3'-phosphate
  modified_base 12: mod_base = OTHER; note = 2'-O-methyladenosine-3'-phosphate
  modified_base 13: mod_base = OTHER; note = 2'-O-methylguanosine-3'-phosphate
  modified_base 14: mod_base = OTHER; note = 2'-O-methyluridine-3'-phosphate
  modified_base 15: mod_base = OTHER; note = 2'-O-methylguanosine-3'-phosphate
  modified_base 16: mod_base = OTHER; note = 2'-O-methyluridine-3'-phosphate
  modified_base 17: mod_base = OTHER; note = 2'-O-methylguanosine-3'-phosphate
  modified_base 18: mod_base = OTHER; note = 2'-O-methylguanosine-3'-phosphate
  modified_base 19: mod_base = OTHER; note = 2'-O-methylcytidine-3'-phosphate
  modified_base 20: mod_base = OTHER; note = 2'-O-methyluridine-3'-phosphate
  modified_base 21: mod_base = OTHER; note = 2'-O-methyladenosine-3'-phosphate ((2S,4R)-1-[29-[[2-(acetylamino)-2-deoxy-beta-D-galactopyra nosyl]oxy]-14,14-bis[[3-[[3-[[5-[[2-(acetylamino)-2-deoxy-b eta-D-galactopyranosyl]oxy]-1-oxopentyl]amino]propyl]amino] -3-oxopropoxy]methyl]-1,12,19,25-tetraoxo-16-oxa-13,20,24-t riazanonacos-1-yl]-4-hydroxy-2-pyrrolidinyl)methyl ester
cgtccagtccaagtgtggcta

SEQ ID NO: 206 - RNA, 21 nt, synthetic construct
  source 1..21: mol_type = other RNA
  modified_base 1: mod_base = OTHER; note = 2'-O-methylguanosine-3'-phosphorothioate
  modified_base 2: mod_base = OTHER; note = 2'-O-methyluridine-3'-phosphorothioate
  modified_base 3: mod_base = OTHER; note = 2'-O-methylcytidine-3'-phosphate
  modified_base 4: mod_base = OTHER; note = 2'-O-methylcytidine-3'-phosphate
  modified_base 5: mod_base = OTHER; note = 2'-O-methyladenosine-3'-phosphate
  modified_base 6: mod_base = OTHER; note = 2'-O-hexadecyl-guanosine-3'-phosphate
  modified_base 7: mod_base = OTHER; note = 2'-O-methyluridine-3'-phosphate
  modified_base 8: mod_base = OTHER; note = 2'-O-methylcytidine-3'-phosphate
  modified_base 9: mod_base = OTHER; note = 2'-deoxy-2'-fluorocytidine-3'-phosphate
  modified_base 10: mod_base = OTHER; note = 2'-deoxy-2'-fluoroadenosine-3'-phosphate
  modified_base 11: mod_base = OTHER; note = 2'-deoxy-2'-fluoroadenosine-3'-phosphate
  modified_base 12: mod_base = OTHER; note = 2'-O-methylguanosine-3'-phosphate
  modified_base 13: mod_base = OTHER; note = 2'-O-methyluridine-3'-phosphate
  modified_base 14: mod_base = OTHER; note = 2'-O-methylguanosine-3'-phosphate
  modified_base 15: mod_base = OTHER; note = 2'-O-methyluridine-3'-phosphate
  modified_base 16: mod_base = OTHER; note = 2'-O-methylguanosine-3'-phosphate
  modified_base 17: mod_base = OTHER; note = 2'-O-methylguanosine-3'-phosphate
  modified_base 18: mod_base = OTHER; note = 2'-O-methylcytidine-3'-phosphate
  modified_base 19: mod_base = OTHER; note = 2'-O-methyluridine-3'-phosphate
  modified_base 20: mod_base = OTHER; note = 2'-O-methylcytidine-3'-phosphate
  modified_base 21: mod_base = OTHER; note = 2'-O-methyladenosine-3'-phosphate ((2S,4R)-1-[29-[[2-(acetylamino)-2-deoxy-beta-D-galactopyra nosyl]oxy]-14,14-bis[[3-[[3-[[5-[[2-(acetylamino)-2-deoxy-b eta-D-galactopyranosyl]oxy]-1-oxopentyl]amino]propyl]amino] -3-oxopropoxy]methyl]-1,12,19,25-tetraoxo-16-oxa-13,20,24-t riazanonacos-1-yl]-4-hydroxy-2-pyrrolidinyl)methyl ester
gtccagtccaagtgtggctca

SEQ ID NO: 207 - RNA, 21 nt, synthetic construct
  source 1..21: mol_type = other RNA
  modified_base 1: mod_base = OTHER; note = 2'-O-methyluridine-3'-phosphorothioate
  modified_base 2: mod_base = OTHER; note = 2'-O-methylcytidine-3'-phosphorothioate
  modified_base 3: mod_base = OTHER; note = 2'-O-methylcytidine-3'-phosphate
  modified_base 4: mod_base = OTHER; note = 2'-O-methyladenosine-3'-phosphate
  modified_base 5: mod_base = OTHER; note = 2'-O-methylguanosine-3'-phosphate
  modified_base 6: mod_base = OTHER; note = 2'-O-hexadecyl-uridine-3'-phosphate
  modified_base 7: mod_base = OTHER; note = 2'-O-methylcytidine-3'-phosphate
  modified_base 8: mod_base = OTHER; note = 2'-O-methylcytidine-3'-phosphate
  modified_base 9: mod_base = OTHER; note = 2'-deoxy-2'-fluoroadenosine-3'-phosphate
  modified_base 10: mod_base = OTHER; note = 2'-deoxy-2'-fluoroadenosine-3'-phosphate
  modified_base 11: mod_base = OTHER; note = 2'-deoxy-2'-fluoroguanosine-3'-phosphate
  modified_base 12: mod_base = OTHER; note = 2'-O-methyluridine-3'-phosphate
  modified_base 13: mod_base = OTHER; note = 2'-O-methylguanosine-3'-phosphate
  modified_base 14: mod_base = OTHER; note = 2'-O-methyluridine-3'-phosphate
  modified_base 15: mod_base = OTHER; note = 2'-O-methylguanosine-3'-phosphate
  modified_base 16: mod_base = OTHER; note = 2'-O-methylguanosine-3'-phosphate
  modified_base 17: mod_base = OTHER; note = 2'-O-methylcytidine-3'-phosphate
  modified_base 18: mod_base = OTHER; note = 2'-O-methyluridine-3'-phosphate
  modified_base 19: mod_base = OTHER; note = 2'-O-methylcytidine-3'-phosphate
  modified_base 20: mod_base = OTHER; note = 2'-O-methyladenosine-3'-phosphate
  modified_base 21: mod_base = OTHER; note = 2'-O-methyladenosine-3'-phosphate ((2S,4R)-1-[29-[[2-(acetylamino)-2-deoxy-beta-D-galactopyra nosyl]oxy]-14,14-bis[[3-[[3-[[5-[[2-(acetylamino)-2-deoxy-b eta-D-galactopyranosyl]oxy]-1-oxopentyl]amino]propyl]amino] -3-oxopropoxy]methyl]-1,12,19,25-tetraoxo-16-oxa-13,20,24-t riazanonacos-1-yl]-4-hydroxy-2-pyrrolidinyl)methyl ester
tccagtccaagtgtggctcaa

SEQ ID NO: 208 - RNA, 21 nt, synthetic construct
  source 1..21: mol_type = other RNA
  modified_base 1: mod_base = OTHER; note = 2'-O-methylcytidine-3'-phosphorothioate
  modified_base 2: mod_base = OTHER; note = 2'-O-methylcytidine-3'-phosphorothioate
  modified_base 3: mod_base = OTHER; note = 2'-O-methyladenosine-3'-phosphate
  modified_base 4: mod_base = OTHER; note = 2'-O-methylguanosine-3'-phosphate
  modified_base 5: mod_base = OTHER; note = 2'-O-methyluridine-3'-phosphate
  modified_base 6: mod_base = OTHER; note = 2'-O-hexadecyl-cytidine-3'-phosphate
  modified_base 7: mod_base = OTHER; note = 2'-O-methylcytidine-3'-phosphate
  modified_base 8: mod_base = OTHER; note = 2'-O-methyladenosine-3'-phosphate
  modified_base 9: mod_base = OTHER; note = 2'-deoxy-2'-fluoroadenosine-3'-phosphate
  modified_base 10: mod_base = OTHER; note = 2'-deoxy-2'-fluoroguanosine-3'-phosphate
  modified_base 11: mod_base = OTHER; note = 2'-deoxy-2'-fluorouridine-3'-phosphate
  modified_base 12: mod_base = OTHER; note = 2'-O-methylguanosine-3'-phosphate
  modified_base 13: mod_base = OTHER; note = 2'-O-methyluridine-3'-phosphate
  modified_base 14: mod_base = OTHER; note = 2'-O-methylguanosine-3'-phosphate
  modified_base 15: mod_base = OTHER; note = 2'-O-methylguanosine-3'-phosphate
  modified_base 16: mod_base = OTHER; note = 2'-O-methylcytidine-3'-phosphate
  modified_base 17: mod_base = OTHER; note = 2'-O-methyluridine-3'-phosphate
  modified_base 18: mod_base = OTHER; note = 2'-O-methylcytidine-3'-phosphate
  modified_base 19: mod_base = OTHER; note = 2'-O-methyladenosine-3'-phosphate
  modified_base 20: mod_base = OTHER; note = 2'-O-methyladenosine-3'-phosphate
  modified_base 21: mod_base = OTHER; note = 2'-O-methyladenosine-3'-phosphate ((2S,4R)-1-[29-[[2-(acetylamino)-2-deoxy-beta-D-galactopyra nosyl]oxy]-14,14-bis[[3-[[3-[[5-[[2-(acetylamino)-2-deoxy-b eta-D-galactopyranosyl]oxy]-1-oxopentyl]amino]propyl]amino] -3-oxopropoxy]methyl]-1,12,19,25-tetraoxo-16-oxa-13,20,24-t riazanonacos-1-yl]-4-hydroxy-2-pyrrolidinyl)methyl ester
ccagtccaagtgtggctcaaa

SEQ ID NO: 209 - RNA, 21 nt, synthetic construct
  source 1..21: mol_type = other RNA
  modified_base 1: mod_base = OTHER; note = 2'-O-methylcytidine-3'-phosphorothioate
  modified_base 2: mod_base = OTHER; note = 2'-O-methyladenosine-3'-phosphorothioate
  modified_base 3: mod_base = OTHER; note = 2'-O-methylguanosine-3'-phosphate
  modified_base 4: mod_base = OTHER; note = 2'-O-methyluridine-3'-phosphate
  modified_base 5: mod_base = OTHER; note = 2'-O-methylcytidine-3'-phosphate
  modified_base 6: mod_base = OTHER; note = 2'-O-hexadecyl-cytidine-3'-phosphate
  modified_base 7: mod_base = OTHER; note = 2'-O-methyladenosine-3'-phosphate
  modified_base 8: mod_base = OTHER; note = 2'-O-methyladenosine-3'-phosphate
  modified_base 9: mod_base = OTHER; note = 2'-deoxy-2'-fluoroguanosine-3'-phosphate
  modified_base 10: mod_base = OTHER; note = 2'-deoxy-2'-fluorouridine-3'-phosphate
  modified_base 11: mod_base = OTHER; note = 2'-deoxy-2'-fluoroguanosine-3'-phosphate
  modified_base 12: mod_base = OTHER; note = 2'-O-methyluridine-3'-phosphate
  modified_base 13: mod_base = OTHER; note = 2'-O-methylguanosine-3'-phosphate
  modified_base 14: mod_base = OTHER; note = 2'-O-methylguanosine-3'-phosphate
  modified_base 15: mod_base = OTHER; note = 2'-O-methylcytidine-3'-phosphate
  modified_base 16: mod_base = OTHER; note = 2'-O-methyluridine-3'-phosphate
  modified_base 17: mod_base = OTHER; note = 2'-O-methylcytidine-3'-phosphate
  modified_base 18: mod_base = OTHER; note = 2'-O-methyladenosine-3'-phosphate
  modified_base 19: mod_base = OTHER; note = 2'-O-methyladenosine-3'-phosphate
  modified_base 20: mod_base = OTHER; note = 2'-O-methyladenosine-3'-phosphate
  modified_base 21: mod_base = OTHER; note = 2'-O-methyladenosine-3'-phosphate ((2S,4R)-1-[29-[[2-(acetylamino)-2-deoxy-beta-D-galactopyra nosyl]oxy]-14,14-bis[[3-[[3-[[5-[[2-(acetylamino)-2-deoxy-b eta-D-galactopyranosyl]oxy]-1-oxopentyl]amino]propyl]amino] -3-oxopropoxy]methyl]-1,12,19,25-tetraoxo-16-oxa-13,20,24-t riazanonacos-1-yl]-4-hydroxy-2-pyrrolidinyl)methyl ester
cagtccaagtgtggctcaaaa

SEQ ID NO: 210 - RNA, 21 nt, synthetic construct
  source 1..21: mol_type = other RNA
  modified_base 1: mod_base = OTHER; note = 2'-O-methyladenosine-3'-phosphorothioate
  modified_base 2: mod_base = OTHER; note = 2'-O-methylguanosine-3'-phosphorothioate
  modified_base 3: mod_base = OTHER; note = 2'-O-methyluridine-3'-phosphate
  modified_base 4: mod_base = OTHER; note = 2'-O-methylcytidine-3'-phosphate
  modified_base 5: mod_base = OTHER; note = 2'-O-methylcytidine-3'-phosphate
  modified_base 6: mod_base = OTHER; note = 2'-O-hexadecyl-adenosine-3'-phosphate
  modified_base 7: mod_base = OTHER; note = 2'-O-methyladenosine-3'-phosphate
  modified_base 8: mod_base = OTHER; note = 2'-O-methylguanosine-3'-phosphate
  modified_base 9: mod_base = OTHER; note = 2'-deoxy-2'-fluorouridine-3'-phosphate
  modified_base 10: mod_base = OTHER; note = 2'-deoxy-2'-fluoroguanosine-3'-phosphate
  modified_base 11: mod_base = OTHER; note = 2'-deoxy-2'-fluorouridine-3'-phosphate
  modified_base 12: mod_base = OTHER; note = 2'-O-methylguanosine-3'-phosphate
  modified_base 13: mod_base = OTHER; note = 2'-O-methylguanosine-3'-phosphate
  modified_base 14: mod_base = OTHER; note = 2'-O-methylcytidine-3'-phosphate
  modified_base 15: mod_base = OTHER; note = 2'-O-methyluridine-3'-phosphate
  modified_base 16: mod_base = OTHER; note = 2'-O-methylcytidine-3'-phosphate
  modified_base 17: mod_base = OTHER; note = 2'-O-methyladenosine-3'-phosphate
  modified_base 18: mod_base = OTHER; note = 2'-O-methyladenosine-3'-phosphate
  modified_base 19: mod_base = OTHER; note = 2'-O-methyladenosine-3'-phosphate
  modified_base 20: mod_base = OTHER; note = 2'-O-methylguanosine-3'-phosphate
  modified_base 21: mod_base = OTHER; note = 2'-O-methyladenosine-3'-phosphate ((2S,4R)-1-[29-[[2-(acetylamino)-2-deoxy-beta-D-galactopyra nosyl]oxy]-14,14-bis[[3-[[3-[[5-[[2-(acetylamino)-2-deoxy-b eta-D-galactopyranosyl]oxy]-1-oxopentyl]amino]propyl]amino] -3-oxopropoxy]methyl]-1,12,19,25-tetraoxo-16-oxa-13,20,24-t riazanonacos-1-yl]-4-hydroxy-2-pyrrolidinyl)methyl ester
agtccaagtgtggctcaaaga

SEQ ID NO: 211 - RNA, 21 nt, synthetic construct
  source 1..21: mol_type = other RNA
  modified_base 1: mod_base = OTHER; note = 2'-O-methylguanosine-3'-phosphorothioate
  modified_base 2: mod_base = OTHER; note = 2'-O-methyluridine-3'-phosphorothioate
  modified_base 3: mod_base = OTHER; note = 2'-O-methylcytidine-3'-phosphate
  modified_base 4: mod_base = OTHER; note = 2'-O-methylcytidine-3'-phosphate
  modified_base 5: mod_base = OTHER; note = 2'-O-methyladenosine-3'-phosphate
  modified_base 6: mod_base = OTHER; note = 2'-O-hexadecyl-adenosine-3'-phosphate
  modified_base 7: mod_base = OTHER; note = 2'-O-methylguanosine-3'-phosphate
  modified_base 8: mod_base = OTHER; note = 2'-O-methyluridine-3'-phosphate
  modified_base 9: mod_base = OTHER; note = 2'-deoxy-2'-fluoroguanosine-3'-phosphate
  modified_base 10: mod_base = OTHER; note = 2'-deoxy-2'-fluorouridine-3'-phosphate
  modified_base 11: mod_base = OTHER; note = 2'-deoxy-2'-fluoroguanosine-3'-phosphate
  modified_base 12: mod_base = OTHER; note = 2'-O-methylguanosine-3'-phosphate
  modified_base 13: mod_base = OTHER; note = 2'-O-methylcytidine-3'-phosphate
  modified_base 14: mod_base = OTHER; note = 2'-O-methyluridine-3'-phosphate
  modified_base 15: mod_base = OTHER; note = 2'-O-methylcytidine-3'-phosphate
  modified_base 16: mod_base = OTHER; note = 2'-O-methyladenosine-3'-phosphate
  modified_base 17: mod_base = OTHER; note = 2'-O-methyladenosine-3'-phosphate
  modified_base 18: mod_base = OTHER; note = 2'-O-methyladenosine-3'-phosphate
  modified_base 19: mod_base = OTHER; note = 2'-O-methylguanosine-3'-phosphate
  modified_base 20: mod_base = OTHER; note = 2'-O-methylguanosine-3'-phosphate
  modified_base 21: mod_base = OTHER; note = 2'-O-methyladenosine-3'-phosphate ((2S,4R)-1-[29-[[2-(acetylamino)-2-deoxy-beta-D-galactopyra nosyl]oxy]-14,14-bis[[3-[[3-[[5-[[2-(acetylamino)-2-deoxy-b eta-D-galactopyranosyl]oxy]-1-oxopentyl]amino]propyl]amino] -3-oxopropoxy]methyl]-1,12,19,25-tetraoxo-16-oxa-13,20,24-t riazanonacos-1-yl]-4-hydroxy-2-pyrrolidinyl)methyl ester
gtccaagtgtggctcaaagga

SEQ ID NO: 212 - RNA, 21 nt, synthetic construct
  source 1..21: mol_type = other RNA
  modified_base 1: mod_base = OTHER; note = 2'-O-methyluridine-3'-phosphorothioate
  modified_base 2: mod_base = OTHER; note = 2'-O-methylcytidine-3'-phosphorothioate
  modified_base 3: mod_base = OTHER; note = 2'-O-methylcytidine-3'-phosphate
  modified_base 4: mod_base = OTHER; note = 2'-O-methyladenosine-3'-phosphate
  modified_base 5: mod_base = OTHER; note = 2'-O-methyladenosine-3'-phosphate
  modified_base 6: mod_base = OTHER; note = 2'-O-hexadecyl-guanosine-3'-phosphate
  modified_base 7: mod_base = OTHER; note = 2'-O-methyluridine-3'-phosphate
  modified_base 8: mod_base = OTHER; note = 2'-O-methylguanosine-3'-phosphate
  modified_base 9: mod_base = OTHER; note = 2'-deoxy-2'-fluorouridine-3'-phosphate
  modified_base 10: mod_base = OTHER; note = 2'-deoxy-2'-fluoroguanosine-3'-phosphate
  modified_base 11: mod_base = OTHER; note = 2'-deoxy-2'-fluoroguanosine-3'-phosphate
  modified_base 12: mod_base = OTHER; note = 2'-O-methylcytidine-3'-phosphate
  modified_base 13: mod_base = OTHER; note = 2'-O-methyluridine-3'-phosphate
  modified_base 14: mod_base = OTHER; note = 2'-O-methylcytidine-3'-phosphate
  modified_base 15: mod_base = OTHER; note = 2'-O-methyladenosine-3'-phosphate
  modified_base 16: mod_base = OTHER; note = 2'-O-methyladenosine-3'-phosphate
  modified_base 17: mod_base = OTHER; note = 2'-O-methyladenosine-3'-phosphate
  modified_base 18: mod_base = OTHER; note = 2'-O-methylguanosine-3'-phosphate
  modified_base 19: mod_base = OTHER; note = 2'-O-methylguanosine-3'-phosphate
  modified_base 20: mod_base = OTHER; note = 2'-O-methyladenosine-3'-phosphate
  modified_base 21: mod_base = OTHER; note = 2'-O-methyladenosine-3'-phosphate ((2S,4R)-1-[29-[[2-(acetylamino)-2-deoxy-beta-D-galactopyra nosyl]oxy]-14,14-bis[[3-[[3-[[5-[[2-(acetylamino)-2-deoxy-b eta-D-galactopyranosyl]oxy]-1-oxopentyl]amino]propyl]amino] -3-oxopropoxy]methyl]-1,12,19,25-tetraoxo-16-oxa-13,20,24-t riazanonacos-1-yl]-4-hydroxy-2-pyrrolidinyl)methyl ester
tccaagtgtggctcaaaggaa

SEQ ID NO: 213 - RNA, 21 nt, synthetic construct
  source 1..21: mol_type = other RNA
  modified_base 1: mod_base = OTHER; note = 2'-O-methylcytidine-3'-phosphorothioate
  modified_base 2: mod_base = OTHER; note = 2'-O-methylcytidine-3'-phosphorothioate
  modified_base 3: mod_base = OTHER; note = 2'-O-methyladenosine-3'-phosphate
  modified_base 4: mod_base = OTHER; note = 2'-O-methyladenosine-3'-phosphate
  modified_base 5: mod_base = OTHER; note = 2'-O-methylguanosine-3'-phosphate
  modified_base 6: mod_base = OTHER; note = 2'-O-hexadecyl-uridine-3'-phosphate
  modified_base 7: mod_base = OTHER; note = 2'-O-methylguanosine-3'-phosphate
  modified_base 8: mod_base = OTHER; note = 2'-O-methyluridine-3'-phosphate
  modified_base 9: mod_base = OTHER; note = 2'-deoxy-2'-fluoroguanosine-3'-phosphate
  modified_base 10: mod_base = OTHER; note = 2'-deoxy-2'-fluoroguanosine-3'-phosphate
  modified_base 11: mod_base = OTHER; note = 2'-deoxy-2'-fluorocytidine-3'-phosphate
  modified_base 12: mod_base = OTHER; note = 2'-O-methyluridine-3'-phosphate
  modified_base 13: mod_base = OTHER; note = 2'-O-methylcytidine-3'-phosphate
  modified_base 14: mod_base = OTHER; note = 2'-O-methyladenosine-3'-phosphate
  modified_base 15: mod_base = OTHER; note = 2'-O-methyladenosine-3'-phosphate
  modified_base 16: mod_base = OTHER; note = 2'-O-methyladenosine-3'-phosphate
  modified_base 17: mod_base = OTHER; note = 2'-O-methylguanosine-3'-phosphate
  modified_base 18: mod_base = OTHER; note = 2'-O-methylguanosine-3'-phosphate
  modified_base 19: mod_base = OTHER; note = 2'-O-methyladenosine-3'-phosphate
  modified_base 20: mod_base = OTHER; note = 2'-O-methyluridine-3'-phosphate
  modified_base 21: mod_base = OTHER; note = 2'-O-methyladenosine-3'-phosphate ((2S,4R)-1-[29-[[2-(acetylamino)-2-deoxy-beta-D-galactopyra nosyl]oxy]-14,14-bis[[3-[[3-[[5-[[2-(acetylamino)-2-deoxy-b eta-D-galactopyranosyl]oxy]-1-oxopentyl]amino]propyl]amino] -3-oxopropoxy]methyl]-1,12,19,25-tetraoxo-16-oxa-13,20,24-t riazanonacos-1-yl]-4-hydroxy-2-pyrrolidinyl)methyl ester
ccaagtgtggctcaaaggata

SEQ ID NO: 214 - RNA, 21 nt, synthetic construct
  source 1..21: mol_type = other RNA
  modified_base 1: mod_base = OTHER; note = 2'-O-methylcytidine-3'-phosphorothioate
  modified_base 2: mod_base = OTHER; note = 2'-O-methyladenosine-3'-phosphorothioate
  modified_base 3: mod_base = OTHER; note = 2'-O-methyladenosine-3'-phosphate
  modified_base 4: mod_base = OTHER; note = 2'-O-methylguanosine-3'-phosphate
  modified_base 5: mod_base = OTHER; note = 2'-O-methyluridine-3'-phosphate
  modified_base 6: mod_base = OTHER; note = 2'-O-hexadecyl-guanosine-3'-phosphate
  modified_base 7: mod_base = OTHER; note = 2'-O-methyluridine-3'-phosphate
  modified_base 8: mod_base = OTHER; note = 2'-O-methylguanosine-3'-phosphate
  modified_base 9: mod_base = OTHER; note = 2'-deoxy-2'-fluoroguanosine-3'-phosphate
  modified_base 10: mod_base = OTHER; note = 2'-deoxy-2'-fluorocytidine-3'-phosphate
  modified_base 11: mod_base = OTHER; note = 2'-deoxy-2'-fluorouridine-3'-phosphate
  modified_base 12: mod_base = OTHER; note = 2'-O-methylcytidine-3'-phosphate
  modified_base 13: mod_base = OTHER; note = 2'-O-methyladenosine-3'-phosphate
  modified_base 14: mod_base = OTHER; note = 2'-O-methyladenosine-3'-phosphate
  modified_base 15: mod_base = OTHER; note = 2'-O-methyladenosine-3'-phosphate
  modified_base 16: mod_base = OTHER; note = 2'-O-methylguanosine-3'-phosphate
  modified_base 17: mod_base = OTHER; note = 2'-O-methylguanosine-3'-phosphate
  modified_base 18: mod_base = OTHER; note = 2'-O-methyladenosine-3'-phosphate
  modified_base 19: mod_base = OTHER; note = 2'-O-methyluridine-3'-phosphate
  modified_base 20: mod_base = OTHER; note = 2'-O-methyladenosine-3'-phosphate
  modified_base 21: mod_base = OTHER; note = 2'-O-methyladenosine-3'-phosphate ((2S,4R)-1-[29-[[2-(acetylamino)-2-deoxy-beta-D-galactopyra nosyl]oxy]-14,14-bis[[3-[[3-[[5-[[2-(acetylamino)-2-deoxy-b eta-D-galactopyranosyl]oxy]-1-oxopentyl]amino]propyl]amino] -3-oxopropoxy]methyl]-1,12,19,25-tetraoxo-16-oxa-13,20,24-t riazanonacos-1-yl]-4-hydroxy-2-pyrrolidinyl)methyl ester
caagtgtggctcaaaggataa

SEQ ID NO: 215 - RNA, 21 nt, synthetic construct
  source 1..21: mol_type = other RNA
  modified_base 1: mod_base = OTHER; note = 2'-O-methyladenosine-3'-phosphorothioate
  modified_base 2: mod_base = OTHER; note = 2'-O-methyladenosine-3'-phosphorothioate
  modified_base 3: mod_base = OTHER; note = 2'-O-methylguanosine-3'-phosphate
  modified_base 4: mod_base = OTHER; note = 2'-O-methyluridine-3'-phosphate
  modified_base 5: mod_base = OTHER; note = 2'-O-methylguanosine-3'-phosphate
  modified_base 6: mod_base = OTHER; note = 2'-O-hexadecyl-uridine-3'-phosphate
  modified_base 7: mod_base = OTHER; note = 2'-O-methylguanosine-3'-phosphate
  modified_base 8: mod_base = OTHER; note = 2'-O-methylguanosine-3'-phosphate
  modified_base 9: mod_base = OTHER; note = 2'-deoxy-2'-fluorocytidine-3'-phosphate
  modified_base 10: mod_base = OTHER; note = 2'-deoxy-2'-fluorouridine-3'-phosphate
  modified_base 11: mod_base = OTHER; note = 2'-deoxy-2'-fluorocytidine-3'-phosphate
  modified_base 12: mod_base = OTHER; note = 2'-O-methyladenosine-3'-phosphate
  modified_base 13: mod_base = OTHER; note = 2'-O-methyladenosine-3'-phosphate
  modified_base 14: mod_base = OTHER; note = 2'-O-methyladenosine-3'-phosphate
  modified_base 15: mod_base = OTHER; note = 2'-O-methylguanosine-3'-phosphate
  modified_base 16: mod_base = OTHER; note = 2'-O-methylguanosine-3'-phosphate
  modified_base 17: mod_base = OTHER; note = 2'-O-methyladenosine-3'-phosphate
  modified_base 18: mod_base = OTHER; note = 2'-O-methyluridine-3'-phosphate
  modified_base 19: mod_base = OTHER; note = 2'-O-methyladenosine-3'-phosphate
  modified_base 20: mod_base = OTHER; note = 2'-O-methyladenosine-3'-phosphate
  modified_base 21: mod_base = OTHER; note = 2'-O-methyladenosine-3'-phosphate ((2S,4R)-1-[29-[[2-(acetylamino)-2-deoxy-beta-D-galactopyra nosyl]oxy]-14,14-bis[[3-[[3-[[5-[[2-(acetylamino)-2-deoxy-b eta-D-galactopyranosyl]oxy]-1-oxopentyl]amino]propyl]amino] -3-oxopropoxy]methyl]-1,12,19,25-tetraoxo-16-oxa-13,20,24-t riazanonacos-1-yl]-4-hydroxy-2-pyrrolidinyl)methyl ester
aagtgtggctcaaaggataaa

SEQ ID NO: 216 - RNA, 21 nt, synthetic construct
  source 1..21: mol_type = other RNA
  modified_base 1: mod_base = OTHER; note = 2'-O-methyladenosine-3'-phosphorothioate
  modified_base 2: mod_base = OTHER; note = 2'-O-methylguanosine-3'-phosphorothioate
  modified_base 3: mod_base = OTHER; note = 2'-O-methyluridine-3'-phosphate
  modified_base 4: mod_base = OTHER; note = 2'-O-methylguanosine-3'-phosphate
  modified_base 5: mod_base = OTHER; note = 2'-O-methyluridine-3'-phosphate
  modified_base 6: mod_base = OTHER; note = 2'-O-hexadecyl-guanosine-3'-phosphate
  modified_base 7: mod_base = OTHER; note = 2'-O-methylguanosine-3'-phosphate
  modified_base 8: mod_base = OTHER; note = 2'-O-methylcytidine-3'-phosphate
  modified_base 9: mod_base = OTHER; note = 2'-deoxy-2'-fluorouridine-3'-phosphate
  modified_base 10: mod_base = OTHER; note = 2'-deoxy-2'-fluorocytidine-3'-phosphate
  modified_base 11: mod_base = OTHER; note = 2'-deoxy-2'-fluoroadenosine-3'-phosphate
  modified_base 12: mod_base = OTHER; note = 2'-O-methyladenosine-3'-phosphate
  modified_base 13: mod_base = OTHER; note = 2'-O-methyladenosine-3'-phosphate
  modified_base 14: mod_base = OTHER; note = 2'-O-methylguanosine-3'-phosphate
  modified_base 15: mod_base = OTHER; note = 2'-O-methylguanosine-3'-phosphate
  modified_base 16: mod_base = OTHER; note = 2'-O-methyladenosine-3'-phosphate
  modified_base 17: mod_base = OTHER; note = 2'-O-methyluridine-3'-phosphate
  modified_base 18: mod_base = OTHER; note = 2'-O-methyladenosine-3'-phosphate
  modified_base 19: mod_base = OTHER; note = 2'-O-methyladenosine-3'-phosphate
  modified_base 20: mod_base = OTHER; note = 2'-O-methyluridine-3'-phosphate
  modified_base 21: mod_base = OTHER; note = 2'-O-methyladenosine-3'-phosphate ((2S,4R)-1-[29-[[2-(acetylamino)-2-deoxy-beta-D-galactopyra nosyl]oxy]-14,14-bis[[3-[[3-[[5-[[2-(acetylamino)-2-deoxy-b eta-D-galactopyranosyl]oxy]-1-oxopentyl]amino]propyl]amino] -3-oxopropoxy]methyl]-1,12,19,25-tetraoxo-16-oxa-13,20,24-t riazanonacos-1-yl]-4-hydroxy-2-pyrrolidinyl)methyl ester
agtgtggctcaaaggataata

SEQ ID NO: 217 - RNA, 21 nt, synthetic construct
  source 1..21: mol_type = other RNA
  modified_base 1: mod_base = OTHER; note = 2'-O-methylguanosine-3'-phosphorothioate
  modified_base 2: mod_base = OTHER; note = 2'-O-methyluridine-3'-phosphorothioate
  modified_base 3: mod_base = OTHER; note = 2'-O-methylguanosine-3'-phosphate
  modified_base 4: mod_base = OTHER; note = 2'-O-methyluridine-3'-phosphate
  modified_base 5: mod_base = OTHER; note = 2'-O-methylguanosine-3'-phosphate
  modified_base 6: mod_base = OTHER; note = 2'-O-hexadecyl-guanosine-3'-phosphate
  modified_base 7: mod_base = OTHER; note = 2'-O-methylcytidine-3'-phosphate
  modified_base 8: mod_base = OTHER; note = 2'-O-methyluridine-3'-phosphate
  modified_base 9: mod_base = OTHER; note = 2'-deoxy-2'-fluorocytidine-3'-phosphate
  modified_base 10: mod_base = OTHER; note = 2'-deoxy-2'-fluoroadenosine-3'-phosphate
  modified_base 11: mod_base = OTHER; note = 2'-deoxy-2'-fluoroadenosine-3'-phosphate
  modified_base 12: mod_base = OTHER; note = 2'-O-methyladenosine-3'-phosphate
  modified_base 13: mod_base = OTHER; note = 2'-O-methylguanosine-3'-phosphate
  modified_base 14: mod_base = OTHER; note = 2'-O-methylguanosine-3'-phosphate
  modified_base 15: mod_base = OTHER; note = 2'-O-methyladenosine-3'-phosphate
  modified_base 16: mod_base = OTHER; note = 2'-O-methyluridine-3'-phosphate
  modified_base 17: mod_base = OTHER; note = 2'-O-methyladenosine-3'-phosphate
  modified_base 18: mod_base = OTHER; note = 2'-O-methyladenosine-3'-phosphate
  modified_base 19: mod_base = OTHER; note = 2'-O-methyluridine-3'-phosphate
  modified_base 20: mod_base = OTHER; note = 2'-O-methyladenosine-3'-phosphate
  modified_base 21: mod_base = OTHER; note = 2'-O-methyladenosine-3'-phosphate ((2S,4R)-1-[29-[[2-(acetylamino)-2-deoxy-beta-D-galactopyra nosyl]oxy]-14,14-bis[[3-[[3-[[5-[[2-(acetylamino)-2-deoxy-b eta-D-galactopyranosyl]oxy]-1-oxopentyl]amino]propyl]amino] -3-oxopropoxy]methyl]-1,12,19,25-tetraoxo-16-oxa-13,20,24-t riazanonacos-1-yl]-4-hydroxy-2-pyrrolidinyl)methyl ester
gtgtggctcaaaggataataa

SEQ ID NO: 218 - RNA, 21 nt, synthetic construct
  source 1..21: mol_type = other RNA
  modified_base 1: mod_base = OTHER; note = 2'-O-methyluridine-3'-phosphorothioate
  modified_base 2: mod_base = OTHER; note = 2'-O-methylguanosine-3'-phosphorothioate
  modified_base 3: mod_base = OTHER; note = 2'-O-methyluridine-3'-phosphate
  modified_base 4: mod_base = OTHER; note = 2'-O-methylguanosine-3'-phosphate
  modified_base 5: mod_base = OTHER; note = 2'-O-methylguanosine-3'-phosphate
  modified_base 6: mod_base = OTHER; note = 2'-O-hexadecyl-cytidine-3'-phosphate
  modified_base 7: mod_base = OTHER; note = 2'-O-methyluridine-3'-phosphate
  modified_base 8: mod_base = OTHER; note = 2'-O-methylcytidine-3'-phosphate
  modified_base 9: mod_base = OTHER; note = 2'-deoxy-2'-fluoroadenosine-3'-phosphate
  modified_base 10: mod_base = OTHER; note = 2'-deoxy-2'-fluoroadenosine-3'-phosphate
  modified_base 11: mod_base = OTHER; note = 2'-deoxy-2'-fluoroadenosine-3'-phosphate
  modified_base 12: mod_base = OTHER; note = 2'-O-methylguanosine-3'-phosphate
  modified_base 13: mod_base = OTHER; note = 2'-O-methylguanosine-3'-phosphate
  modified_base 14: mod_base = OTHER; note = 2'-O-methyladenosine-3'-phosphate
  modified_base 15: mod_base = OTHER; note = 2'-O-methyluridine-3'-phosphate
  modified_base 16: mod_base = OTHER; note = 2'-O-methyladenosine-3'-phosphate
  modified_base 17: mod_base = OTHER; note = 2'-O-methyladenosine-3'-phosphate
  modified_base 18: mod_base = OTHER; note = 2'-O-methyluridine-3'-phosphate
  modified_base 19: mod_base = OTHER; note = 2'-O-methyladenosine-3'-phosphate
  modified_base 20: mod_base = OTHER; note = 2'-O-methyluridine-3'-phosphate
  modified_base 21: mod_base = OTHER; note = 2'-O-methyladenosine-3'-phosphate ((2S,4R)-1-[29-[[2-(acetylamino)-2-deoxy-beta-D-galactopyra nosyl]oxy]-14,14-bis[[3-[[3-[[5-[[2-(acetylamino)-2-deoxy-b eta-D-galactopyranosyl]oxy]-1-oxopentyl]amino]propyl]amino] -3-oxopropoxy]methyl]-1,12,19,25-tetraoxo-16-oxa-13,20,24-t riazanonacos-1-yl]-4-hydroxy-2-pyrrolidinyl)methyl ester
tgtggctcaaaggataatata

SEQ ID NO: 219 - RNA, 21 nt, synthetic construct
  source 1..21: mol_type = other RNA
  modified_base 1: mod_base = OTHER; note = 2'-O-methylguanosine-3'-phosphorothioate
  modified_base 2: mod_base = OTHER; note = 2'-O-methyluridine-3'-phosphorothioate
  modified_base 3: mod_base = OTHER; note = 2'-O-methylguanosine-3'-phosphate
  modified_base 4: mod_base = OTHER; note = 2'-O-methylguanosine-3'-phosphate
  modified_base 5: mod_base = OTHER; note = 2'-O-methylcytidine-3'-phosphate
  modified_base 6: mod_base = OTHER; note = 2'-O-hexadecyl-uridine-3'-phosphate
  modified_base 7: mod_base = OTHER; note = 2'-O-methylcytidine-3'-phosphate
  modified_base 8: mod_base = OTHER; note = 2'-O-methyladenosine-3'-phosphate
  modified_base 9: mod_base = OTHER; note = 2'-deoxy-2'-fluoroadenosine-3'-phosphate
  modified_base 10: mod_base = OTHER; note = 2'-deoxy-2'-fluoroadenosine-3'-phosphate
  modified_base 11: mod_base = OTHER; note = 2'-deoxy-2'-fluoroguanosine-3'-phosphate
  modified_base 12: mod_base = OTHER; note = 2'-O-methylguanosine-3'-phosphate
  modified_base 13: mod_base = OTHER; note = 2'-O-methyladenosine-3'-phosphate
  modified_base 14: mod_base = OTHER; note = 2'-O-methyluridine-3'-phosphate
  modified_base 15: mod_base = OTHER; note = 2'-O-methyladenosine-3'-phosphate
  modified_base 16: mod_base = OTHER; note = 2'-O-methyladenosine-3'-phosphate
  modified_base 17: mod_base = OTHER; note = 2'-O-methyluridine-3'-phosphate
  modified_base 18: mod_base = OTHER; note = 2'-O-methyladenosine-3'-phosphate
  modified_base 19: mod_base = OTHER; note = 2'-O-methyluridine-3'-phosphate
  modified_base 20: mod_base = OTHER; note = 2'-O-methylcytidine-3'-phosphate
  modified_base 21: mod_base = OTHER; note = 2'-O-methyladenosine-3'-phosphate ((2S,4R)-1-[29-[[2-(acetylamino)-2-deoxy-beta-D-galactopyra nosyl]oxy]-14,14-bis[[3-[[3-[[5-[[2-(acetylamino)-2-deoxy-b eta-D-galactopyranosyl]oxy]-1-oxopentyl]amino]propyl]amino] -3-oxopropoxy]methyl]-1,12,19,25-tetraoxo-16-oxa-13,20,24-t riazanonacos-1-yl]-4-hydroxy-2-pyrrolidinyl)methyl ester
gtggctcaaaggataatatca

SEQ ID NO: 220 - RNA, 21 nt, synthetic construct
  source 1..21: mol_type = other RNA
  modified_base 1: mod_base = OTHER; note = 2'-O-methyluridine-3'-phosphorothioate
  modified_base 2: mod_base = OTHER; note = 2'-O-methylguanosine-3'-phosphorothioate
  modified_base 3: mod_base = OTHER; note = 2'-O-methylguanosine-3'-phosphate
  modified_base 4: mod_base = OTHER; note = 2'-O-methylcytidine-3'-phosphate
  modified_base 5: mod_base = OTHER; note = 2'-O-methyluridine-3'-phosphate
  modified_base 6: mod_base = OTHER; note = 2'-O-hexadecyl-cytidine-3'-phosphate
  modified_base 7: mod_base = OTHER; note = 2'-O-methyladenosine-3'-phosphate
  modified_base 8: mod_base = OTHER; note = 2'-O-methyladenosine-3'-phosphate
  modified_base 9: mod_base = OTHER; note = 2'-deoxy-2'-fluoroadenosine-3'-phosphate
  modified_base 10: mod_base = OTHER; note = 2'-deoxy-2'-fluoroguanosine-3'-phosphate
  modified_base 11: mod_base = OTHER; note = 2'-deoxy-2'-fluoroguanosine-3'-phosphate
  modified_base 12: mod_base = OTHER; note = 2'-O-methyladenosine-3'-phosphate
  modified_base 13: mod_base = OTHER; note = 2'-O-methyluridine-3'-phosphate
  modified_base 14: mod_base = OTHER; note = 2'-O-methyladenosine-3'-phosphate
  modified_base 15: mod_base = OTHER; note = 2'-O-methyladenosine-3'-phosphate
  modified_base 16: mod_base = OTHER; note = 2'-O-methyluridine-3'-phosphate
  modified_base 17: mod_base = OTHER; note = 2'-O-methyladenosine-3'-phosphate
  modified_base 18: mod_base = OTHER; note = 2'-O-methyluridine-3'-phosphate
  modified_base 19: mod_base = OTHER; note = 2'-O-methylcytidine-3'-phosphate
  modified_base 20: mod_base = OTHER; note = 2'-O-methyladenosine-3'-phosphate
  modified_base 21: mod_base = OTHER; note = 2'-O-methyladenosine-3'-phosphate ((2S,4R)-1-[29-[[2-(acetylamino)-2-deoxy-beta-D-galactopyra nosyl]oxy]-14,14-bis[[3-[[3-[[5-[[2-(acetylamino)-2-deoxy-b eta-D-galactopyranosyl]oxy]-1-oxopentyl]amino]propyl]amino] -3-oxopropoxy]methyl]-1,12,19,25-tetraoxo-16-oxa-13,20,24-t riazanonacos-1-yl]-4-hydroxy-2-pyrrolidinyl)methyl ester
tggctcaaaggataatatcaa

SEQ ID NO: 221 - RNA, 21 nt, synthetic construct
  source 1..21: mol_type = other RNA
  modified_base 1: mod_base = OTHER; note = 2'-O-methylguanosine-3'-phosphorothioate
  modified_base 2: mod_base = OTHER; note = 2'-O-methylguanosine-3'-phosphorothioate
  modified_base 3: mod_base = OTHER; note = 2'-O-methylcytidine-3'-phosphate
  modified_base 4: mod_base = OTHER; note = 2'-O-methyluridine-3'-phosphate
  modified_base 5: mod_base = OTHER; note = 2'-O-methylcytidine-3'-phosphate
  modified_base 6: mod_base = OTHER; note = 2'-O-hexadecyl-adenosine-3'-phosphate
  modified_base 7: mod_base = OTHER; note = 2'-O-methyladenosine-3'-phosphate
  modified_base 8: mod_base = OTHER; note = 2'-O-methyladenosine-3'-phosphate
  modified_base 9: mod_base = OTHER; note = 2'-deoxy-2'-fluoroguanosine-3'-phosphate
  modified_base 10: mod_base = OTHER; note = 2'-deoxy-2'-fluoroguanosine-3'-phosphate
  modified_base 11: mod_base = OTHER; note = 2'-deoxy-2'-fluoroadenosine-3'-phosphate
  modified_base 12: mod_base = OTHER; note = 2'-O-methyluridine-3'-phosphate
  modified_base 13: mod_base = OTHER; note = 2'-O-methyladenosine-3'-phosphate
  modified_base 14: mod_base = OTHER; note = 2'-O-methyladenosine-3'-phosphate
  modified_base 15: mod_base = OTHER; note = 2'-O-methyluridine-3'-phosphate
  modified_base 16: mod_base = OTHER; note = 2'-O-methyladenosine-3'-phosphate
  modified_base 17: mod_base = OTHER; note = 2'-O-methyluridine-3'-phosphate
  modified_base 18: mod_base = OTHER; note = 2'-O-methylcytidine-3'-phosphate
  modified_base 19: mod_base = OTHER; note = 2'-O-methyladenosine-3'-phosphate
  modified_base 20: mod_base = OTHER; note = 2'-O-methyladenosine-3'-phosphate
  modified_base 21: mod_base = OTHER; note = 2'-O-methyladenosine-3'-phosphate ((2S,4R)-1-[29-[[2-(acetylamino)-2-deoxy-beta-D-galactopyra nosyl]oxy]-14,14-bis[[3-[[3-[[5-[[2-(acetylamino)-2-deoxy-b eta-D-galactopyranosyl]oxy]-1-oxopentyl]amino]propyl]amino] -3-oxopropoxy]methyl]-1,12,19,25-tetraoxo-16-oxa-13,20,24-t riazanonacos-1-yl]-4-hydroxy-2-pyrrolidinyl)methyl ester
ggctcaaaggataatatcaaa

SEQ ID NO: 222 - RNA, 21 nt, synthetic construct
  source 1..21: mol_type = other RNA
  modified_base 1: mod_base = OTHER; note = 2'-O-methylguanosine-3'-phosphorothioate
  modified_base 2: mod_base = OTHER; note = 2'-O-methylcytidine-3'-phosphorothioate
  modified_base 3: mod_base = OTHER; note = 2'-O-methyluridine-3'-phosphate
  modified_base 4: mod_base = OTHER; note = 2'-O-methylcytidine-3'-phosphate
  modified_base 5: mod_base = OTHER; note = 2'-O-methyladenosine-3'-phosphate
  modified_base 6: mod_base = OTHER; note = 2'-O-hexadecyl-adenosine-3'-phosphate
  modified_base 7: mod_base = OTHER; note = 2'-O-methyladenosine-3'-phosphate
  modified_base 8: mod_base = OTHER; note = 2'-O-methylguanosine-3'-phosphate
  modified_base 9: mod_base = OTHER; note = 2'-deoxy-2'-fluoroguanosine-3'-phosphate
  modified_base 10: mod_base = OTHER; note = 2'-deoxy-2'-fluoroadenosine-3'-phosphate
  modified_base 11: mod_base = OTHER; note = 2'-deoxy-2'-fluorouridine-3'-phosphate
  modified_base 12: mod_base = OTHER; note = 2'-O-methyladenosine-3'-phosphate
  modified_base 13: mod_base = OTHER; note = 2'-O-methyladenosine-3'-phosphate
  modified_base 14: mod_base = OTHER; note = 2'-O-methyluridine-3'-phosphate
  modified_base 15: mod_base = OTHER; note = 2'-O-methyladenosine-3'-phosphate
  modified_base 16: mod_base = OTHER; note = 2'-O-methyluridine-3'-phosphate
  modified_base 17: mod_base = OTHER; note = 2'-O-methylcytidine-3'-phosphate
  modified_base 18: mod_base = OTHER; note = 2'-O-methyladenosine-3'-phosphate
  modified_base 19: mod_base = OTHER; note = 2'-O-methyladenosine-3'-phosphate
  modified_base 20: mod_base = OTHER; note = 2'-O-methyladenosine-3'-phosphate
  modified_base 21: mod_base = OTHER; note = 2'-O-methyladenosine-3'-phosphate ((2S,4R)-1-[29-[[2-(acetylamino)-2-deoxy-beta-D-galactopyra nosyl]oxy]-14,14-bis[[3-[[3-[[5-[[2-(acetylamino)-2-deoxy-b eta-D-galactopyranosyl]oxy]-1-oxopentyl]amino]propyl]amino] -3-oxopropoxy]methyl]-1,12,19,25-tetraoxo-16-oxa-13,20,24-t riazanonacos-1-yl]-4-hydroxy-2-pyrrolidinyl)methyl ester
gctcaaaggataatatcaaaa

SEQ ID NO: 223 - RNA, 21 nt, synthetic construct
  source 1..21: mol_type = other RNA
  modified_base 1: mod_base = OTHER; note = 2'-O-methylcytidine-3'-phosphorothioate
  modified_base 2: mod_base = OTHER; note = 2'-O-methyluridine-3'-phosphorothioate
  modified_base 3: mod_base = OTHER; note = 2'-O-methylcytidine-3'-phosphate
  modified_base 4: mod_base = OTHER; note = 2'-O-methyladenosine-3'-phosphate
  modified_base 5: mod_base = OTHER; note = 2'-O-methyladenosine-3'-phosphate
  modified_base 6: mod_base = OTHER; note = 2'-O-hexadecyl-adenosine-3'-phosphate
  modified_base 7: mod_base = OTHER; note = 2'-O-methylguanosine-3'-phosphate
  modified_base 8: mod_base = OTHER; note = 2'-O-methylguanosine-3'-phosphate
  modified_base 9: mod_base = OTHER; note = 2'-deoxy-2'-fluoroadenosine-3'-phosphate
  modified_base 10: mod_base = OTHER; note = 2'-deoxy-2'-fluorouridine-3'-phosphate
  modified_base 11: mod_base = OTHER; note = 2'-deoxy-2'-fluoroadenosine-3'-phosphate
  modified_base 12: mod_base = OTHER; note = 2'-O-methyladenosine-3'-phosphate
  modified_base 13: mod_base = OTHER; note = 2'-O-methyluridine-3'-phosphate
  modified_base 14: mod_base = OTHER; note = 2'-O-methyladenosine-3'-phosphate
  modified_base 15: mod_base = OTHER; note = 2'-O-methyluridine-3'-phosphate
  modified_base 16: mod_base = OTHER; note = 2'-O-methylcytidine-3'-phosphate
  modified_base 17: mod_base = OTHER; note = 2'-O-methyladenosine-3'-phosphate
  modified_base 18: mod_base = OTHER; note = 2'-O-methyladenosine-3'-phosphate
  modified_base 19: mod_base = OTHER; note = 2'-O-methyladenosine-3'-phosphate
  modified_base 20: mod_base = OTHER; note = 2'-O-methylcytidine-3'-phosphate
  modified_base 21: mod_base = OTHER; note = 2'-O-methyladenosine-3'-phosphate ((2S,4R)-1-[29-[[2-(acetylamino)-2-deoxy-beta-D-galactopyra nosyl]oxy]-14,14-bis[[3-[[3-[[5-[[2-(acetylamino)-2-deoxy-b eta-D-galactopyranosyl]oxy]-1-oxopentyl]amino]propyl]amino] -3-oxopropoxy]methyl]-1,12,19,25-tetraoxo-16-oxa-13,20,24-t riazanonacos-1-yl]-4-hydroxy-2-pyrrolidinyl)methyl ester
ctcaaaggataatatcaaaca

SEQ ID NO: 224 - RNA, 21 nt, synthetic construct
  source 1..21: mol_type = other RNA
  modified_base 1: mod_base = OTHER; note = 2'-O-methyluridine-3'-phosphorothioate
  modified_base 2: mod_base = OTHER; note = 2'-O-methylcytidine-3'-phosphorothioate
  modified_base 3: mod_base = OTHER; note = 2'-O-methyladenosine-3'-phosphate
  modified_base 4: mod_base = OTHER; note = 2'-O-methyladenosine-3'-phosphate
  modified_base 5: mod_base = OTHER; note = 2'-O-methyladenosine-3'-phosphate
  modified_base 6: mod_base = OTHER; note = 2'-O-hexadecyl-guanosine-3'-phosphate
  modified_base 7: mod_base = OTHER; note = 2'-O-methylguanosine-3'-phosphate
  modified_base 8: mod_base = OTHER; note = 2'-O-methyladenosine-3'-phosphate
  modified_base 9: mod_base = OTHER; note = 2'-deoxy-2'-fluorouridine-3'-phosphate
  modified_base 10: mod_base = OTHER; note = 2'-deoxy-2'-fluoroadenosine-3'-phosphate
  modified_base 11: mod_base = OTHER; note = 2'-deoxy-2'-fluoroadenosine-3'-phosphate
  modified_base 12: mod_base = OTHER; note = 2'-O-methyluridine-3'-phosphate
  modified_base 13: mod_base = OTHER; note = 2'-O-methyladenosine-3'-phosphate
  modified_base 14: mod_base = OTHER; note = 2'-O-methyluridine-3'-phosphate
  modified_base 15: mod_base = OTHER; note = 2'-O-methylcytidine-3'-phosphate
  modified_base 16: mod_base = OTHER; note = 2'-O-methyladenosine-3'-phosphate
  modified_base 17: mod_base = OTHER; note = 2'-O-methyladenosine-3'-phosphate
  modified_base 18: mod_base = OTHER; note = 2'-O-methyladenosine-3'-phosphate
  modified_base 19: mod_base = OTHER; note = 2'-O-methylcytidine-3'-phosphate
  modified_base 20: mod_base = OTHER; note = 2'-O-methyladenosine-3'-phosphate
  modified_base 21: mod_base = OTHER; note = 2'-O-methyladenosine-3'-phosphate ((2S,4R)-1-[29-[[2-(acetylamino)-2-deoxy-beta-D-galactopyra nosyl]oxy]-14,14-bis[[3-[[3-[[5-[[2-(acetylamino)-2-deoxy-b eta-D-galactopyranosyl]oxy]-1-oxopentyl]amino]propyl]amino] -3-oxopropoxy]methyl]-1,12,19,25-tetraoxo-16-oxa-13,20,24-t riazanonacos-1-yl]-4-hydroxy-2-pyrrolidinyl)methyl ester
tcaaaggataatatcaaacaa

SEQ ID NO: 225 - RNA, 21 nt, synthetic construct
  source 1..21: mol_type = other RNA
  modified_base 1: mod_base = OTHER; note = 2'-O-methylcytidine-3'-phosphorothioate
  modified_base 2: mod_base = OTHER; note = 2'-O-methyladenosine-3'-phosphorothioate
  modified_base 3: mod_base = OTHER; note = 2'-O-methyladenosine-3'-phosphate
  modified_base 4: mod_base = OTHER; note = 2'-O-methyladenosine-3'-phosphate
  modified_base 5: mod_base = OTHER; note = 2'-O-methylguanosine-3'-phosphate
  modified_base 6: mod_base = OTHER; note = 2'-O-hexadecyl-guanosine-3'-phosphate
  modified_base 7: mod_base = OTHER; note = 2'-O-methyladenosine-3'-phosphate
  modified_base 8: mod_base = OTHER; note = 2'-O-methyluridine-3'-phosphate
  modified_base 9: mod_base = OTHER; note = 2'-deoxy-2'-fluoroadenosine-3'-phosphate
  modified_base 10: mod_base = OTHER; note = 2'-deoxy-2'-fluoroadenosine-3'-phosphate
  modified_base 11: mod_base = OTHER; note = 2'-deoxy-2'-fluorouridine-3'-phosphate
  modified_base 12: mod_base = OTHER; note = 2'-O-methyladenosine-3'-phosphate
  modified_base 13: mod_base = OTHER; note = 2'-O-methyluridine-3'-phosphate
  modified_base 14: mod_base = OTHER; note = 2'-O-methylcytidine-3'-phosphate
  modified_base 15: mod_base = OTHER; note = 2'-O-methyladenosine-3'-phosphate
  modified_base 16: mod_base = OTHER; note = 2'-O-methyladenosine-3'-phosphate
  modified_base 17: mod_base = OTHER; note = 2'-O-methyladenosine-3'-phosphate
  modified_base 18: mod_base = OTHER; note = 2'-O-methylcytidine-3'-phosphate
  modified_base 19: mod_base = OTHER; note = 2'-O-methyladenosine-3'-phosphate
  modified_base 20: mod_base = OTHER; note = 2'-O-methylcytidine-3'-phosphate
  modified_base 21: mod_base = OTHER; note = 2'-O-methyladenosine-3'-phosphate ((2S,4R)-1-[29-[[2-(acetylamino)-2-deoxy-beta-D-galactopyra nosyl]oxy]-14,14-bis[[3-[[3-[[5-[[2-(acetylamino)-2-deoxy-b eta-D-galactopyranosyl]oxy]-1-oxopentyl]amino]propyl]amino] -3-oxopropoxy]methyl]-1,12,19,25-tetraoxo-16-oxa-13,20,24-t riazanonacos-1-yl]-4-hydroxy-2-pyrrolidinyl)methyl ester
caaaggataatatcaaacaca

SEQ ID NO: 226 - RNA, 21 nt, synthetic construct
  source 1..21: mol_type = other RNA
  modified_base 1: mod_base = OTHER; note = 2'-O-methyladenosine-3'-phosphorothioate
  modified_base 2: mod_base = OTHER; note = 2'-O-methyladenosine-3'-phosphorothioate
  modified_base 3: mod_base = OTHER; note = 2'-O-methyladenosine-3'-phosphate
  modified_base 4: mod_base = OTHER; note = 2'-O-methylguanosine-3'-phosphate
  modified_base 5: mod_base = OTHER; note = 2'-O-methylguanosine-3'-phosphate
  modified_base 6: mod_base = OTHER; note = 2'-O-hexadecyl-adenosine-3'-phosphate
  modified_base 7: mod_base = OTHER; note = 2'-O-methyluridine-3'-phosphate
  modified_base 8: mod_base = OTHER; note = 2'-O-methyladenosine-3'-phosphate
  modified_base 9: mod_base = OTHER; note = 2'-deoxy-2'-fluoroadenosine-3'-phosphate
  modified_base 10: mod_base = OTHER; note = 2'-deoxy-2'-fluorouridine-3'-phosphate
  modified_base 11: mod_base = OTHER; note = 2'-deoxy-2'-fluoroadenosine-3'-phosphate
  modified_base 12: mod_base = OTHER; note = 2'-O-methyluridine-3'-phosphate
  modified_base 13: mod_base = OTHER; note = 2'-O-methylcytidine-3'-phosphate
  modified_base 14: mod_base = OTHER; note = 2'-O-methyladenosine-3'-phosphate
  modified_base 15: mod_base = OTHER; note = 2'-O-methyladenosine-3'-phosphate
  modified_base 16: mod_base = OTHER; note = 2'-O-methyladenosine-3'-phosphate
  modified_base 17: mod_base = OTHER; note = 2'-O-methylcytidine-3'-phosphate
  modified_base 18: mod_base = OTHER; note = 2'-O-methyladenosine-3'-phosphate
  modified_base 19: mod_base = OTHER; note = 2'-O-methylcytidine-3'-phosphate
  modified_base 20: mod_base = OTHER; note = 2'-O-methylguanosine-3'-phosphate
  modified_base 21: mod_base = OTHER; note = 2'-O-methyladenosine-3'-phosphate ((2S,4R)-1-[29-[[2-(acetylamino)-2-deoxy-beta-D-galactopyra nosyl]oxy]-14,14-bis[[3-[[3-[[5-[[2-(acetylamino)-2-deoxy-b eta-D-galactopyranosyl]oxy]-1-oxopentyl]amino]propyl]amino] -3-oxopropoxy]methyl]-1,12,19,25-tetraoxo-16-oxa-13,20,24-t riazanonacos-1-yl]-4-hydroxy-2-pyrrolidinyl)methyl ester
aaaggataatatcaaacacga

SEQ ID NO: 227 - RNA, 21 nt, synthetic construct
  source 1..21: mol_type = other RNA
  modified_base 1: mod_base = OTHER; note = 2'-O-methyladenosine-3'-phosphorothioate
  modified_base 2: mod_base = OTHER; note = 2'-O-methyladenosine-3'-phosphorothioate
  modified_base 3: mod_base = OTHER; note = 2'-O-methylguanosine-3'-phosphate
  modified_base 4: mod_base = OTHER; note = 2'-O-methylguanosine-3'-phosphate
  modified_base 5: mod_base = OTHER; note = 2'-O-methyladenosine-3'-phosphate
  modified_base 6: mod_base = OTHER; note = 2'-O-hexadecyl-uridine-3'-phosphate
  modified_base 7: mod_base = OTHER; note = 2'-O-methyladenosine-3'-phosphate
  modified_base 8: mod_base = OTHER; note = 2'-O-methyladenosine-3'-phosphate
  modified_base 9: mod_base = OTHER; note = 2'-deoxy-2'-fluorouridine-3'-phosphate
  modified_base 10: mod_base = OTHER; note = 2'-deoxy-2'-fluoroadenosine-3'-phosphate
  modified_base 11: mod_base = OTHER; note = 2'-deoxy-2'-fluorouridine-3'-phosphate
  modified_base 12: mod_base = OTHER; note = 2'-O-methylcytidine-3'-phosphate
  modified_base 13: mod_base = OTHER; note = 2'-O-methyladenosine-3'-phosphate
  modified_base 14: mod_base = OTHER; note = 2'-O-methyladenosine-3'-phosphate
  modified_base 15: mod_base = OTHER; note = 2'-O-methyladenosine-3'-phosphate
  modified_base 16: mod_base = OTHER; note = 2'-O-methylcytidine-3'-phosphate
  modified_base 17: mod_base = OTHER; note = 2'-O-methyladenosine-3'-phosphate
  modified_base 18: mod_base = OTHER; note = 2'-O-methylcytidine-3'-phosphate
  modified_base 19: mod_base = OTHER; note = 2'-O-methylguanosine-3'-phosphate
  modified_base 20: mod_base = OTHER; note = 2'-O-methyluridine-3'-phosphate
  modified_base 21: mod_base = OTHER; note = 2'-O-methyladenosine-3'-phosphate ((2S,4R)-1-[29-[[2-(acetylamino)-2-deoxy-beta-D-galactopyra nosyl]oxy]-14,14-bis[[3-[[3-[[5-[[2-(acetylamino)-2-deoxy-b eta-D-galactopyranosyl]oxy]-1-oxopentyl]amino]propyl]amino] -3-oxopropoxy]methyl]-1,12,19,25-tetraoxo-16-oxa-13,20,24-t riazanonacos-1-yl]-4-hydroxy-2-pyrrolidinyl)methyl ester
aaggataatatcaaacacgta

SEQ ID NO: 228 - RNA, 21 nt, synthetic construct
  source 1..21: mol_type = other RNA
  modified_base 1: mod_base = OTHER; note = 2'-O-methyladenosine-3'-phosphorothioate
  modified_base 2: mod_base = OTHER; note = 2'-O-methylguanosine-3'-phosphorothioate
  modified_base 3: mod_base = OTHER; note = 2'-O-methylguanosine-3'-phosphate
  modified_base 4: mod_base = OTHER; note = 2'-O-methyladenosine-3'-phosphate
  modified_base 5: mod_base = OTHER; note = 2'-O-methyluridine-3'-phosphate
  modified_base 6: mod_base = OTHER; note = 2'-O-hexadecyl-adenosine-3'-phosphate
  modified_base 7: mod_base = OTHER; note = 2'-O-methyladenosine-3'-phosphate
  modified_base 8: mod_base = OTHER; note = 2'-O-methyluridine-3'-phosphate
  modified_base 9: mod_base = OTHER; note = 2'-deoxy-2'-fluoroadenosine-3'-phosphate
  modified_base 10: mod_base = OTHER; note = 2'-deoxy-2'-fluorouridine-3'-phosphate
  modified_base 11: mod_base = OTHER; note = 2'-deoxy-2'-fluorocytidine-3'-phosphate
  modified_base 12: mod_base = OTHER; note = 2'-O-methyladenosine-3'-phosphate
  modified_base 13: mod_base = OTHER; note = 2'-O-methyladenosine-3'-phosphate
  modified_base 14: mod_base = OTHER; note = 2'-O-methyladenosine-3'-phosphate
  modified_base 15: mod_base = OTHER; note = 2'-O-methylcytidine-3'-phosphate
  modified_base 16: mod_base = OTHER; note = 2'-O-methyladenosine-3'-phosphate
  modified_base 17: mod_base = OTHER; note = 2'-O-methylcytidine-3'-phosphate
  modified_base 18: mod_base = OTHER; note = 2'-O-methylguanosine-3'-phosphate
  modified_base 19: mod_base = OTHER; note = 2'-O-methyluridine-3'-phosphate
  modified_base 20: mod_base = OTHER; note = 2'-O-methylcytidine-3'-phosphate
  modified_base 21: mod_base = OTHER; note = 2'-O-methyladenosine-3'-phosphate ((2S,4R)-1-[29-[[2-(acetylamino)-2-deoxy-beta-D-galactopyra nosyl]oxy]-14,14-bis[[3-[[3-[[5-[[2-(acetylamino)-2-deoxy-b eta-D-galactopyranosyl]oxy]-1-oxopentyl]amino]propyl]amino] -3-oxopropoxy]methyl]-1,12,19,25-tetraoxo-16-oxa-13,20,24-t riazanonacos-1-yl]-4-hydroxy-2-pyrrolidinyl)methyl ester
aggataatatcaaacacgtca

SEQ ID NO: 229 - RNA, 21 nt, synthetic construct
  source 1..21: mol_type = other RNA
  modified_base 1: mod_base = OTHER; note = 2'-O-methylguanosine-3'-phosphorothioate
  modified_base 2: mod_base = OTHER; note = 2'-O-methylguanosine-3'-phosphorothioate
  modified_base 3: mod_base = OTHER; note = 2'-O-methyladenosine-3'-phosphate
  modified_base 4: mod_base = OTHER; note = 2'-O-methyluridine-3'-phosphate
  modified_base 5: mod_base = OTHER; note = 2'-O-methyladenosine-3'-phosphate
  modified_base 6: mod_base = OTHER; note = 2'-O-hexadecyl-adenosine-3'-phosphate
  modified_base 7: mod_base = OTHER; note = 2'-O-methyluridine-3'-phosphate
  modified_base 8: mod_base = OTHER; note = 2'-O-methyladenosine-3'-phosphate
  modified_base 9: mod_base = OTHER; note = 2'-deoxy-2'-fluorouridine-3'-phosphate
  modified_base 10: mod_base = OTHER; note = 2'-deoxy-2'-fluorocytidine-3'-phosphate
  modified_base 11: mod_base = OTHER; note = 2'-deoxy-2'-fluoroadenosine-3'-phosphate
  modified_base 12: mod_base = OTHER; note = 2'-O-methyladenosine-3'-phosphate
  modified_base 13: mod_base = OTHER; note = 2'-O-methyladenosine-3'-phosphate
  modified_base 14: mod_base = OTHER; note = 2'-O-methylcytidine-3'-phosphate
  modified_base 15: mod_base = OTHER; note = 2'-O-methyladenosine-3'-phosphate
  modified_base 16: mod_base = OTHER; note = 2'-O-methylcytidine-3'-phosphate
  modified_base 17: mod_base = OTHER; note = 2'-O-methylguanosine-3'-phosphate
  modified_base 18: mod_base = OTHER; note = 2'-O-methyluridine-3'-phosphate
  modified_base 19: mod_base = OTHER; note = 2'-O-methylcytidine-3'-phosphate
  modified_base 20: mod_base = OTHER; note = 2'-O-methylcytidine-3'-phosphate
  modified_base 21: mod_base = OTHER; note = 2'-O-methyladenosine-3'-phosphate ((2S,4R)-1-[29-[[2-(acetylamino)-2-deoxy-beta-D-galactopyra nosyl]oxy]-14,14-bis[[3-[[3-[[5-[[2-(acetylamino)-2-deoxy-b eta-D-galactopyranosyl]oxy]-1-oxopentyl]amino]propyl]amino] -3-oxopropoxy]methyl]-1,12,19,25-tetraoxo-16-oxa-13,20,24-t riazanonacos-1-yl]-4-hydroxy-2-pyrrolidinyl)methyl ester
ggataatatcaaacacgtcca

SEQ ID NO: 230 - RNA, 21 nt, synthetic construct
  source 1..21: mol_type = other RNA
  modified_base 1: mod_base = OTHER; note = 2'-O-methylguanosine-3'-phosphorothioate
  modified_base 2: mod_base = OTHER; note = 2'-O-methyladenosine-3'-phosphorothioate
  modified_base 3: mod_base = OTHER; note = 2'-O-methyluridine-3'-phosphate
  modified_base 4: mod_base = OTHER; note = 2'-O-methyladenosine-3'-phosphate
  modified_base 5: mod_base = OTHER; note = 2'-O-methyladenosine-3'-phosphate
  modified_base 6: mod_base = OTHER; note = 2'-O-hexadecyl-uridine-3'-phosphate
  modified_base 7: mod_base = OTHER; note = 2'-O-methyladenosine-3'-phosphate
  modified_base 8: mod_base = OTHER; note = 2'-O-methyluridine-3'-phosphate
  modified_base 9: mod_base = OTHER; note = 2'-deoxy-2'-fluorocytidine-3'-phosphate
  modified_base 10: mod_base = OTHER; note = 2'-deoxy-2'-fluoroadenosine-3'-phosphate
  modified_base 11: mod_base = OTHER; note = 2'-deoxy-2'-fluoroadenosine-3'-phosphate
  modified_base 12: mod_base = OTHER; note = 2'-O-methyladenosine-3'-phosphate
  modified_base 13: mod_base = OTHER; note = 2'-O-methylcytidine-3'-phosphate
  modified_base 14: mod_base = OTHER; note = 2'-O-methyladenosine-3'-phosphate
  modified_base 15: mod_base = OTHER; note = 2'-O-methylcytidine-3'-phosphate
  modified_base 16: mod_base = OTHER; note = 2'-O-methylguanosine-3'-phosphate
  modified_base 17: mod_base = OTHER; note = 2'-O-methyluridine-3'-phosphate
  modified_base 18: mod_base = OTHER; note = 2'-O-methylcytidine-3'-phosphate
  modified_base 19: mod_base = OTHER; note = 2'-O-methylcytidine-3'-phosphate
  modified_base 20: mod_base = OTHER; note = 2'-O-methylcytidine-3'-phosphate
  modified_base 21: mod_base = OTHER; note = 2'-O-methyladenosine-3'-phosphate ((2S,4R)-1-[29-[[2-(acetylamino)-2-deoxy-beta-D-galactopyra nosyl]oxy]-14,14-bis[[3-[[3-[[5-[[2-(acetylamino)-2-deoxy-b eta-D-galactopyranosyl]oxy]-1-oxopentyl]amino]propyl]amino] -3-oxopropoxy]methyl]-1,12,19,25-tetraoxo-16-oxa-13,20,24-t riazanonacos-1-yl]-4-hydroxy-2-pyrrolidinyl)methyl ester
gataatatcaaacacgtccca

SEQ ID NO: 231 - RNA, 21 nt, synthetic construct
  source 1..21: mol_type = other RNA
  modified_base 1: mod_base = OTHER; note = 2'-O-methyladenosine-3'-phosphorothioate
  modified_base 2: mod_base = OTHER; note = 2'-O-methyluridine-3'-phosphorothioate
  modified_base 3: mod_base = OTHER; note = 2'-O-methyladenosine-3'-phosphate
  modified_base 4: mod_base = OTHER; note = 2'-O-methyladenosine-3'-phosphate
  modified_base 5: mod_base = OTHER; note = 2'-O-methyluridine-3'-phosphate
  modified_base 6: mod_base = OTHER; note = 2'-O-hexadecyl-adenosine-3'-phosphate
  modified_base 7: mod_base = OTHER; note = 2'-O-methyluridine-3'-phosphate
  modified_base 8: mod_base = OTHER; note = 2'-O-methylcytidine-3'-phosphate
  modified_base 9: mod_base = OTHER; note = 2'-deoxy-2'-fluoroadenosine-3'-phosphate
  modified_base 10: mod_base = OTHER; note = 2'-deoxy-2'-fluoroadenosine-3'-phosphate
  modified_base 11: mod_base = OTHER; note = 2'-deoxy-2'-fluoroadenosine-3'-phosphate
  modified_base 12: mod_base = OTHER; note = 2'-O-methylcytidine-3'-phosphate
  modified_base 13: mod_base = OTHER; note = 2'-O-methyladenosine-3'-phosphate
  modified_base 14: mod_base = OTHER; note = 2'-O-methylcytidine-3'-phosphate
  modified_base 15: mod_base = OTHER; note = 2'-O-methylguanosine-3'-phosphate
  modified_base 16: mod_base = OTHER; note = 2'-O-methyluridine-3'-phosphate
  modified_base 17: mod_base = OTHER; note = 2'-O-methylcytidine-3'-phosphate
  modified_base 18: mod_base = OTHER; note = 2'-O-methylcytidine-3'-phosphate
  modified_base 19: mod_base = OTHER; note = 2'-O-methylcytidine-3'-phosphate
  modified_base 20: mod_base = OTHER; note = 2'-O-methylguanosine-3'-phosphate
  modified_base 21: mod_base = OTHER; note = 2'-O-methyladenosine-3'-phosphate ((2S,4R)-1-[29-[[2-(acetylamino)-2-deoxy-beta-D-galactopyra nosyl]oxy]-14,14-bis[[3-[[3-[[5-[[2-(acetylamino)-2-deoxy-b eta-D-galactopyranosyl]oxy]-1-oxopentyl]amino]propyl]amino] -3-oxopropoxy]methyl]-1,12,19,25-tetraoxo-16-oxa-13,20,24-t riazanonacos-1-yl]-4-hydroxy-2-pyrrolidinyl)methyl ester
ataatatcaaacacgtcccga

SEQ ID NO: 232 - RNA, 21 nt, synthetic construct
  source 1..21: mol_type = other RNA
  modified_base 1: mod_base = OTHER; note = 2'-O-methyluridine-3'-phosphorothioate
  modified_base 2: mod_base = OTHER; note = 2'-O-methyladenosine-3'-phosphorothioate
  modified_base 3: mod_base = OTHER; note = 2'-O-methyladenosine-3'-phosphate
  modified_base 4: mod_base = OTHER; note = 2'-O-methyluridine-3'-phosphate
  modified_base 5: mod_base = OTHER; note = 2'-O-methyladenosine-3'-phosphate
  modified_base 6: mod_base = OTHER; note = 2'-O-hexadecyl-uridine-3'-phosphate
  modified_base 7: mod_base = OTHER; note = 2'-O-methylcytidine-3'-phosphate
  modified_base 8: mod_base = OTHER; note = 2'-O-methyladenosine-3'-phosphate
  modified_base 9: mod_base = OTHER; note = 2'-deoxy-2'-fluoroadenosine-3'-phosphate
  modified_base 10: mod_base = OTHER; note = 2'-deoxy-2'-fluoroadenosine-3'-phosphate
  modified_base 11: mod_base = OTHER; note = 2'-deoxy-2'-fluorocytidine-3'-phosphate
  modified_base 12: mod_base = OTHER; note = 2'-O-methyladenosine-3'-phosphate
  modified_base 13: mod_base = OTHER; note = 2'-O-methylcytidine-3'-phosphate
  modified_base 14: mod_base = OTHER; note = 2'-O-methylguanosine-3'-phosphate
  modified_base 15: mod_base = OTHER; note = 2'-O-methyluridine-3'-phosphate
  modified_base 16: mod_base = OTHER; note = 2'-O-methylcytidine-3'-phosphate
  modified_base 17: mod_base = OTHER; note = 2'-O-methylcytidine-3'-phosphate
  modified_base 18: mod_base = OTHER; note = 2'-O-methylcytidine-3'-phosphate
  modified_base 19: mod_base = OTHER; note = 2'-O-methylguanosine-3'-phosphate
  modified_base 20: mod_base = OTHER; note = 2'-O-methylguanosine-3'-phosphate
  modified_base 21: mod_base = OTHER; note = 2'-O-methyladenosine-3'-phosphate ((2S,4R)-1-[29-[[2-(acetylamino)-2-deoxy-beta-D-galactopyra nosyl]oxy]-14,14-bis[[3-[[3-[[5-[[2-(acetylamino)-2-deoxy-b eta-D-galactopyranosyl]oxy]-1-oxopentyl]amino]propyl]amino] -3-oxopropoxy]methyl]-1,12,19,25-tetraoxo-16-oxa-13,20,24-t riazanonacos-1-yl]-4-hydroxy-2-pyrrolidinyl)methyl ester
taatatcaaacacgtcccgga

SEQ ID NO: 233 - RNA, 21 nt, synthetic construct
  source 1..21: mol_type = other RNA
  modified_base 1: mod_base = OTHER; note = 2'-O-methyluridine-3'-phosphorothioate
  modified_base 2: mod_base = OTHER; note = 2'-O-methyladenosine-3'-phosphorothioate
  modified_base 3: mod_base = OTHER; note = 2'-O-methyladenosine-3'-phosphate
  modified_base 4: mod_base = OTHER; note = 2'-O-methyluridine-3'-phosphate
  modified_base 5: mod_base = OTHER; note = 2'-O-methyladenosine-3'-phosphate
  modified_base 6: mod_base = OTHER; note = 2'-O-hexadecyl-uridine-3'-phosphate
  modified_base 7: mod_base = OTHER; note = 2'-O-methylcytidine-3'-phosphate
  modified_base 8: mod_base = OTHER; note = 2'-O-methyladenosine-3'-phosphate
  modified_base 9: mod_base = OTHER; note = 2'-deoxy-2'-fluoroadenosine-3'-phosphate
  modified_base 10: mod_base = OTHER; note = 2'-deoxy-2'-fluoroadenosine-3'-phosphate
  modified_base 11: mod_base = OTHER; note = 2'-deoxy-2'-fluorocytidine-3'-phosphate
  modified_base 12: mod_base = OTHER; note = 2'-O-methyladenosine-3'-phosphate
  modified_base 13: mod_base = OTHER; note = 2'-O-methylcytidine-3'-phosphate
  modified_base 14: mod_base = OTHER; note = 2'-O-methylguanosine-3'-phosphate
  modified_base 15: mod_base = OTHER; note = 2'-O-methyluridine-3'-phosphate
  modified_base 16: mod_base = OTHER; note = 2'-O-methylcytidine-3'-phosphate
  modified_base 17: mod_base = OTHER; note = 2'-O-methylcytidine-3'-phosphate
  modified_base 18: mod_base = OTHER; note = 2'-O-methylcytidine-3'-phosphate
  modified_base 19: mod_base = OTHER; note = 2'-O-methylguanosine-3'-phosphate
  modified_base 20: mod_base = OTHER; note = 2'-O-methylguanosine-3'-phosphate
  modified_base 21: mod_base = OTHER; note = 2'-O-methyladenosine-3'-phosphate ((2S,4R)-1-[29-[[2-(acetylamino)-2-deoxy-beta-D-galactopyra nosyl]oxy]-14,14-bis[[3-[[3-[[5-[[2-(acetylamino)-2-deoxy-b eta-D-galactopyranosyl]oxy]-1-oxopentyl]amino]propyl]amino] -3-oxopropoxy]methyl]-1,12,19,25-tetraoxo-16-oxa-13,20,24-t riazanonacos-1-yl]-4-hydroxy-2-pyrrolidinyl)methyl ester
taatatcaaacacgtcccgga

SEQ ID NO: 234 - RNA, 21 nt, synthetic construct
  source 1..21: mol_type = other RNA
  modified_base 1: mod_base = OTHER; note = 2'-O-methyladenosine-3'-phosphorothioate
  modified_base 2: mod_base = OTHER; note = 2'-O-methyladenosine-3'-phosphorothioate
  modified_base 3: mod_base = OTHER; note = 2'-O-methyluridine-3'-phosphate
  modified_base 4: mod_base = OTHER; note = 2'-O-methyladenosine-3'-phosphate
  modified_base 5: mod_base = OTHER; note = 2'-O-methyluridine-3'-phosphate
  modified_base 6: mod_base = OTHER; note = 2'-O-hexadecyl-cytidine-3'-phosphate
  modified_base 7: mod_base = OTHER; note = 2'-O-methyladenosine-3'-phosphate
  modified_base 8: mod_base = OTHER; note = 2'-O-methyladenosine-3'-phosphate
  modified_base 9: mod_base = OTHER; note = 2'-deoxy-2'-fluoroadenosine-3'-phosphate
  modified_base 10: mod_base = OTHER; note = 2'-deoxy-2'-fluorocytidine-3'-phosphate
  modified_base 11: mod_base = OTHER; note = 2'-deoxy-2'-fluoroadenosine-3'-phosphate
  modified_base 12: mod_base = OTHER; note = 2'-O-methylcytidine-3'-phosphate
  modified_base 13: mod_base = OTHER; note = 2'-O-methylguanosine-3'-phosphate
  modified_base 14: mod_base = OTHER; note = 2'-O-methyluridine-3'-phosphate
  modified_base 15: mod_base = OTHER; note = 2'-O-methylcytidine-3'-phosphate
  modified_base 16: mod_base = OTHER; note = 2'-O-methylcytidine-3'-phosphate
  modified_base 17: mod_base = OTHER; note = 2'-O-methylcytidine-3'-phosphate
  modified_base 18: mod_base = OTHER; note = 2'-O-methylguanosine-3'-phosphate
  modified_base 19: mod_base = OTHER; note = 2'-O-methylguanosine-3'-phosphate
  modified_base 20: mod_base = OTHER; note = 2'-O-methylguanosine-3'-phosphate
  modified_base 21: mod_base = OTHER; note = 2'-O-methyladenosine-3'-phosphate ((2S,4R)-1-[29-[[2-(acetylamino)-2-deoxy-beta-D-galactopyra nosyl]oxy]-14,14-bis[[3-[[3-[[5-[[2-(acetylamino)-2-deoxy-b eta-D-galactopyranosyl]oxy]-1-oxopentyl]amino]propyl]amino] -3-oxopropoxy]methyl]-1,12,19,25-tetraoxo-16-oxa-13,20,24-t riazanonacos-1-yl]-4-hydroxy-2-pyrrolidinyl)methyl ester
aatatcaaacacgtcccggga

SEQ ID NO: 235 - RNA, 21 nt, synthetic construct
  source 1..21: mol_type = other RNA
  modified_base 1: mod_base = OTHER; note = 2'-O-methyladenosine-3'-phosphorothioate
  modified_base 2: mod_base = OTHER; note = 2'-O-methyluridine-3'-phosphorothioate
  modified_base 3: mod_base = OTHER; note = 2'-O-methyladenosine-3'-phosphate
  modified_base 4: mod_base = OTHER; note = 2'-O-methyluridine-3'-phosphate
  modified_base 5: mod_base = OTHER; note = 2'-O-methylcytidine-3'-phosphate
  modified_base 6: mod_base = OTHER; note = 2'-O-hexadecyl-adenosine-3'-phosphate
  modified_base 7: mod_base = OTHER; note = 2'-O-methyladenosine-3'-phosphate
  modified_base 8: mod_base = OTHER; note = 2'-O-methyladenosine-3'-phosphate
  modified_base 9: mod_base = OTHER; note = 2'-deoxy-2'-fluorocytidine-3'-phosphate
  modified_base 10: mod_base = OTHER; note = 2'-deoxy-2'-fluoroadenosine-3'-phosphate
  modified_base 11: mod_base = OTHER; note = 2'-deoxy-2'-fluorocytidine-3'-phosphate
  modified_base 12: mod_base = OTHER; note = 2'-O-methylguanosine-3'-phosphate
  modified_base 13: mod_base = OTHER; note = 2'-O-methyluridine-3'-phosphate
  modified_base 14: mod_base = OTHER; note = 2'-O-methylcytidine-3'-phosphate
  modified_base 15: mod_base = OTHER; note = 2'-O-methylcytidine-3'-phosphate
  modified_base 16: mod_base = OTHER; note = 2'-O-methylcytidine-3'-phosphate
  modified_base 17: mod_base = OTHER; note = 2'-O-methylguanosine-3'-phosphate
  modified_base 18: mod_base = OTHER; note = 2'-O-methylguanosine-3'-phosphate
  modified_base 19: mod_base = OTHER; note = 2'-O-methylguanosine-3'-phosphate
  modified_base 20: mod_base = OTHER; note = 2'-O-methyladenosine-3'-phosphate
  modified_base 21: mod_base = OTHER; note = 2'-O-methyladenosine-3'-phosphate ((2S,4R)-1-[29-[[2-(acetylamino)-2-deoxy-beta-D-galactopyra nosyl]oxy]-14,14-bis[[3-[[3-[[5-[[2-(acetylamino)-2-deoxy-b eta-D-galactopyranosyl]oxy]-1-oxopentyl]amino]propyl]amino] -3-oxopropoxy]methyl]-1,12,19,25-tetraoxo-16-oxa-13,20,24-t riazanonacos-1-yl]-4-hydroxy-2-pyrrolidinyl)methyl ester
atatcaaacacgtcccgggaa

SEQ ID NO: 236 - RNA, 21 nt, synthetic construct
  source 1..21: mol_type = other RNA
  modified_base 1: mod_base = OTHER; note = 2'-O-methyladenosine-3'-phosphorothioate
  modified_base 2: mod_base = OTHER; note = 2'-O-methyluridine-3'-phosphorothioate
  modified_base 3: mod_base = OTHER; note = 2'-O-methyladenosine-3'-phosphate
  modified_base 4: mod_base = OTHER; note = 2'-O-methyluridine-3'-phosphate
  modified_base 5: mod_base = OTHER; note = 2'-O-methylcytidine-3'-phosphate
  modified_base 6: mod_base = OTHER; note = 2'-O-hexadecyl-adenosine-3'-phosphate
  modified_base 7: mod_base = OTHER; note = 2'-O-methyladenosine-3'-phosphate
  modified_base 8: mod_base = OTHER; note = 2'-O-methyladenosine-3'-phosphate
  modified_base 9: mod_base = OTHER; note = 2'-deoxy-2'-fluorocytidine-3'-phosphate
  modified_base 10: mod_base = OTHER; note = 2'-deoxy-2'-fluoroadenosine-3'-phosphate
  modified_base 11: mod_base = OTHER; note = 2'-deoxy-2'-fluorocytidine-3'-phosphate
  modified_base 12: mod_base = OTHER; note = 2'-O-methylguanosine-3'-phosphate
  modified_base 13: mod_base = OTHER; note = 2'-O-methyluridine-3'-phosphate
  modified_base 14: mod_base = OTHER; note = 2'-O-methylcytidine-3'-phosphate
  modified_base 15: mod_base = OTHER; note = 2'-O-methylcytidine-3'-phosphate
  modified_base 16: mod_base = OTHER; note = 2'-O-methylcytidine-3'-phosphate
  modified_base 17: mod_base = OTHER; note = 2'-O-methylguanosine-3'-phosphate
  modified_base 18: mod_base = OTHER; note = 2'-O-methylguanosine-3'-phosphate
  modified_base 19: mod_base = OTHER; note = 2'-O-methylguanosine-3'-phosphate
  modified_base 20: mod_base = OTHER; note = 2'-O-methyladenosine-3'-phosphate
  modified_base 21: mod_base = OTHER; note = 2'-O-methyladenosine-3'-phosphate ((2S,4R)-1-[29-[[2-(acetylamino)-2-deoxy-beta-D-galactopyra nosyl]oxy]-14,14-bis[[3-[[3-[[5-[[2-(acetylamino)-2-deoxy-b eta-D-galactopyranosyl]oxy]-1-oxopentyl]amino]propyl]amino] -3-oxopropoxy]methyl]-1,12,19,25-tetraoxo-16-oxa-13,20,24-t riazanonacos-1-yl]-4-hydroxy-2-pyrrolidinyl)methyl ester
atatcaaacacgtcccgggaa

SEQ ID NO: 237 - RNA, 21 nt, synthetic construct
  source 1..21: mol_type = other RNA
  modified_base 1: mod_base = OTHER; note = 2'-O-methyluridine-3'-phosphorothioate
  modified_base 2: mod_base = OTHER; note = 2'-O-methyladenosine-3'-phosphorothioate
  modified_base 3: mod_base = OTHER; note = 2'-O-methyluridine-3'-phosphate
  modified_base 4: mod_base = OTHER; note = 2'-O-methylcytidine-3'-phosphate
  modified_base 5: mod_base = OTHER; note = 2'-O-methyladenosine-3'-phosphate
  modified_base 6: mod_base = OTHER; note = 2'-O-hexadecyl-adenosine-3'-phosphate
  modified_base 7: mod_base = OTHER; note = 2'-O-methyladenosine-3'-phosphate
  modified_base 8: mod_base = OTHER; note = 2'-O-methylcytidine-3'-phosphate
  modified_base 9: mod_base = OTHER; note = 2'-deoxy-2'-fluoroadenosine-3'-phosphate
  modified_base 10: mod_base = OTHER; note = 2'-deoxy-2'-fluorocytidine-3'-phosphate
  modified_base 11: mod_base = OTHER; note = 2'-deoxy-2'-fluoroguanosine-3'-phosphate
  modified_base 12: mod_base = OTHER; note = 2'-O-methyluridine-3'-phosphate
  modified_base 13: mod_base = OTHER; note = 2'-O-methylcytidine-3'-phosphate
  modified_base 14: mod_base = OTHER; note = 2'-O-methylcytidine-3'-phosphate
  modified_base 15: mod_base = OTHER; note = 2'-O-methylcytidine-3'-phosphate
  modified_base 16: mod_base = OTHER; note = 2'-O-methylguanosine-3'-phosphate
  modified_base 17: mod_base = OTHER; note = 2'-O-methylguanosine-3'-phosphate
  modified_base 18: mod_base = OTHER; note = 2'-O-methylguanosine-3'-phosphate
  modified_base 19: mod_base = OTHER; note = 2'-O-methyladenosine-3'-phosphate
  modified_base 20: mod_base = OTHER; note = 2'-O-methylguanosine-3'-phosphate
  modified_base 21: mod_base = OTHER; note = 2'-O-methyladenosine-3'-phosphate ((2S,4R)-1-[29-[[2-(acetylamino)-2-deoxy-beta-D-galactopyra nosyl]oxy]-14,14-bis[[3-[[3-[[5-[[2-(acetylamino)-2-deoxy-b eta-D-galactopyranosyl]oxy]-1-oxopentyl]amino]propyl]amino] -3-oxopropoxy]methyl]-1,12,19,25-tetraoxo-16-oxa-13,20,24-t riazanonacos-1-yl]-4-hydroxy-2-pyrrolidinyl)methyl ester
tatcaaacacgtcccgggaga

SEQ ID NO: 238 - RNA, 21 nt, synthetic construct
  source 1..21: mol_type = other RNA
  modified_base 1: mod_base = OTHER; note = 2'-O-methyladenosine-3'-phosphorothioate
  modified_base 2: mod_base = OTHER; note = 2'-O-methyluridine-3'-phosphorothioate
  modified_base 3: mod_base = OTHER; note = 2'-O-methylcytidine-3'-phosphate
  modified_base 4: mod_base = OTHER; note = 2'-O-methyladenosine-3'-phosphate
  modified_base 5: mod_base = OTHER; note = 2'-O-methyladenosine-3'-phosphate
  modified_base 6: mod_base = OTHER; note = 2'-O-hexadecyl-adenosine-3'-phosphate
  modified_base 7: mod_base = OTHER; note = 2'-O-methylcytidine-3'-phosphate
  modified_base 8: mod_base = OTHER; note = 2'-O-methyladenosine-3'-phosphate
  modified_base 9: mod_base = OTHER; note = 2'-deoxy-2'-fluorocytidine-3'-phosphate
  modified_base 10: mod_base = OTHER; note = 2'-deoxy-2'-fluoroguanosine-3'-phosphate
  modified_base 11: mod_base = OTHER; note = 2'-deoxy-2'-fluorouridine-3'-phosphate
  modified_base 12: mod_base = OTHER; note = 2'-O-methylcytidine-3'-phosphate
  modified_base 13: mod_base = OTHER; note = 2'-O-methylcytidine-3'-phosphate
  modified_base 14: mod_base = OTHER; note = 2'-O-methylcytidine-3'-phosphate
  modified_base 15: mod_base = OTHER; note = 2'-O-methylguanosine-3'-phosphate
  modified_base 16: mod_base = OTHER; note = 2'-O-methylguanosine-3'-phosphate
  modified_base 17: mod_base = OTHER; note = 2'-O-methylguanosine-3'-phosphate
  modified_base 18: mod_base = OTHER; note = 2'-O-methyladenosine-3'-phosphate
  modified_base 19: mod_base = OTHER; note = 2'-O-methylguanosine-3'-phosphate
  modified_base 20: mod_base = OTHER; note = 2'-O-methylguanosine-3'-phosphate
  modified_base 21: mod_base = OTHER; note = 2'-O-methyladenosine-3'-phosphate ((2S,4R)-1-[29-[[2-(acetylamino)-2-deoxy-beta-D-galactopyra nosyl]oxy]-14,14-bis[[3-[[3-[[5-[[2-(acetylamino)-2-deoxy-b eta-D-galactopyranosyl]oxy]-1-oxopentyl]amino]propyl]amino] -3-oxopropoxy]methyl]-1,12,19,25-tetraoxo-16-oxa-13,20,24-t riazanonacos-1-yl]-4-hydroxy-2-pyrrolidinyl)methyl ester
atcaaacacgtcccgggagga

SEQ ID NO: 239 - RNA, 21 nt, synthetic construct
  source 1..21: mol_type = other RNA
  modified_base 1: mod_base = OTHER; note = 2'-O-methyluridine-3'-phosphorothioate
  modified_base 2: mod_base = OTHER; note = 2'-O-methylcytidine-3'-phosphorothioate
  modified_base 3: mod_base = OTHER; note = 2'-O-methyladenosine-3'-phosphate
  modified_base 4: mod_base = OTHER; note = 2'-O-methyladenosine-3'-phosphate
  modified_base 5: mod_base = OTHER; note = 2'-O-methyladenosine-3'-phosphate
  modified_base 6: mod_base = OTHER; note = 2'-O-hexadecyl-cytidine-3'-phosphate
  modified_base 7: mod_base = OTHER; note = 2'-O-methyladenosine-3'-phosphate
  modified_base 8: mod_base = OTHER; note = 2'-O-methylcytidine-3'-phosphate
  modified_base 9: mod_base = OTHER; note = 2'-deoxy-2'-fluoroguanosine-3'-phosphate
  modified_base 10: mod_base = OTHER; note = 2'-deoxy-2'-fluorouridine-3'-phosphate
  modified_base 11: mod_base = OTHER; note = 2'-deoxy-2'-fluorocytidine-3'-phosphate
  modified_base 12: mod_base = OTHER; note = 2'-O-methylcytidine-3'-phosphate
  modified_base 13: mod_base = OTHER; note = 2'-O-methylcytidine-3'-phosphate
  modified_base 14: mod_base = OTHER; note = 2'-O-methylguanosine-3'-phosphate
  modified_base 15: mod_base = OTHER; note = 2'-O-methylguanosine-3'-phosphate
  modified_base 16: mod_base = OTHER; note = 2'-O-methylguanosine-3'-phosphate
  modified_base 17: mod_base = OTHER; note = 2'-O-methyladenosine-3'-phosphate
  modified_base 18: mod_base = OTHER; note = 2'-O-methylguanosine-3'-phosphate
  modified_base 19: mod_base = OTHER; note = 2'-O-methylguanosine-3'-phosphate
  modified_base 20: mod_base = OTHER; note = 2'-O-methylcytidine-3'-phosphate
  modified_base 21: mod_base = OTHER; note = 2'-O-methyladenosine-3'-phosphate ((2S,4R)-1-[29-[[2-(acetylamino)-2-deoxy-beta-D-galactopyra nosyl]oxy]-14,14-bis[[3-[[3-[[5-[[2-(acetylamino)-2-deoxy-b eta-D-galactopyranosyl]oxy]-1-oxopentyl]amino]propyl]amino] -3-oxopropoxy]methyl]-1,12,19,25-tetraoxo-16-oxa-13,20,24-t riazanonacos-1-yl]-4-hydroxy-2-pyrrolidinyl)methyl ester
tcaaacacgtcccgggaggca

SEQ ID NO: 240 - RNA, 21 nt, synthetic construct
  source 1..21: mol_type = other RNA
  modified_base 1: mod_base = OTHER; note = 2'-O-methyluridine-3'-phosphorothioate
  modified_base 2: mod_base = OTHER; note = 2'-O-methylcytidine-3'-phosphorothioate
  modified_base 3: mod_base = OTHER; note = 2'-O-methyladenosine-3'-phosphate
  modified_base 4: mod_base = OTHER; note = 2'-O-methyladenosine-3'-phosphate
  modified_base 5: mod_base = OTHER; note = 2'-O-methyladenosine-3'-phosphate
  modified_base 6: mod_base = OTHER; note = 2'-O-hexadecyl-cytidine-3'-phosphate
  modified_base 7: mod_base = OTHER; note = 2'-O-methyladenosine-3'-phosphate
  modified_base 8: mod_base = OTHER; note = 2'-O-methylcytidine-3'-phosphate
  modified_base 9: mod_base = OTHER; note = 2'-deoxy-2'-fluoroguanosine-3'-phosphate
  modified_base 10: mod_base = OTHER; note = 2'-deoxy-2'-fluorouridine-3'-phosphate
  modified_base 11: mod_base = OTHER; note = 2'-deoxy-2'-fluorocytidine-3'-phosphate
  modified_base 12: mod_base = OTHER; note = 2'-O-methylcytidine-3'-phosphate
  modified_base 13: mod_base = OTHER; note = 2'-O-methylcytidine-3'-phosphate
  modified_base 14: mod_base = OTHER; note = 2'-O-methylguanosine-3'-phosphate
  modified_base 15: mod_base = OTHER; note = 2'-O-methylguanosine-3'-phosphate
  modified_base 16: mod_base = OTHER; note = 2'-O-methylguanosine-3'-phosphate
  modified_base 17: mod_base = OTHER; note = 2'-O-methyladenosine-3'-phosphate
  modified_base 18: mod_base = OTHER; note = 2'-O-methylguanosine-3'-phosphate
  modified_base 19: mod_base = OTHER; note = 2'-O-methylguanosine-3'-phosphate
  modified_base 20: mod_base = OTHER; note = 2'-O-methylcytidine-3'-phosphate
  modified_base 21: mod_base = OTHER; note = 2'-O-methyladenosine-3'-phosphate ((2S,4R)-1-[29-[[2-(acetylamino)-2-deoxy-beta-D-galactopyra nosyl]oxy]-14,14-bis[[3-[[3-[[5-[[2-(acetylamino)-2-deoxy-b eta-D-galactopyranosyl]oxy]-1-oxopentyl]amino]propyl]amino] -3-oxopropoxy]methyl]-1,12,19,25-tetraoxo-16-oxa-13,20,24-t riazanonacos-1-yl]-4-hydroxy-2-pyrrolidinyl)methyl ester
tcaaacacgtcccgggaggca

SEQ ID NO: 241 - RNA, 21 nt, synthetic construct
  source 1..21: mol_type = other RNA
  modified_base 1: mod_base = OTHER; note = 2'-O-methylcytidine-3'-phosphorothioate
  modified_base 2: mod_base = OTHER; note = 2'-O-methyladenosine-3'-phosphorothioate
  modified_base 3: mod_base = OTHER; note = 2'-O-methyladenosine-3'-phosphate
  modified_base 4: mod_base = OTHER; note = 2'-O-methyladenosine-3'-phosphate
  modified_base 5: mod_base = OTHER; note = 2'-O-methylcytidine-3'-phosphate
  modified_base 6: mod_base = OTHER; note = 2'-O-hexadecyl-adenosine-3'-phosphate
  modified_base 7: mod_base = OTHER; note = 2'-O-methylcytidine-3'-phosphate
  modified_base 8: mod_base = OTHER; note = 2'-O-methylguanosine-3'-phosphate
  modified_base 9: mod_base = OTHER; note = 2'-deoxy-2'-fluorouridine-3'-phosphate
  modified_base 10: mod_base = OTHER; note = 2'-deoxy-2'-fluorocytidine-3'-phosphate
  modified_base 11: mod_base = OTHER; note = 2'-deoxy-2'-fluorocytidine-3'-phosphate
  modified_base 12: mod_base = OTHER; note = 2'-O-methylcytidine-3'-phosphate
  modified_base 13: mod_base = OTHER; note = 2'-O-methylguanosine-3'-phosphate
  modified_base 14: mod_base = OTHER; note = 2'-O-methylguanosine-3'-phosphate
  modified_base 15: mod_base = OTHER; note = 2'-O-methylguanosine-3'-phosphate
  modified_base 16: mod_base = OTHER; note = 2'-O-methyladenosine-3'-phosphate
  modified_base 17: mod_base = OTHER; note = 2'-O-methylguanosine-3'-phosphate
  modified_base 18: mod_base = OTHER; note = 2'-O-methylguanosine-3'-phosphate
  modified_base 19: mod_base = OTHER; note = 2'-O-methylcytidine-3'-phosphate
  modified_base 20: mod_base = OTHER; note = 2'-O-methylguanosine-3'-phosphate
  modified_base 21: mod_base = OTHER; note = 2'-O-methyladenosine-3'-phosphate ((2S,4R)-1-[29-[[2-(acetylamino)-2-deoxy-beta-D-galactopyra nosyl]oxy]-14,14-bis[[3-[[3-[[5-[[2-(acetylamino)-2-deoxy-b eta-D-galactopyranosyl]oxy]-1-oxopentyl]amino]propyl]amino] -3-oxopropoxy]methyl]-1,12,19,25-tetraoxo-16-oxa-13,20,24-t riazanonacos-1-yl]-4-hydroxy-2-pyrrolidinyl)methyl ester
caaacacgtcccgggaggcga

SEQ ID NO: 242 - RNA, 21 nt, synthetic construct
  source 1..21: mol_type = other RNA
  modified_base 1: mod_base = OTHER; note = 2'-O-methylcytidine-3'-phosphorothioate
  modified_base 2: mod_base = OTHER; note = 2'-O-methyladenosine-3'-phosphorothioate
  modified_base 3: mod_base = OTHER; note = 2'-O-methyladenosine-3'-phosphate
  modified_base 4: mod_base = OTHER; note = 2'-O-methyladenosine-3'-phosphate
  modified_base 5: mod_base = OTHER; note = 2'-O-methylcytidine-3'-phosphate
  modified_base 6: mod_base = OTHER; note = 2'-O-hexadecyl-adenosine-3'-phosphate
  modified_base 7: mod_base = OTHER; note = 2'-O-methylcytidine-3'-phosphate
  modified_base 8: mod_base = OTHER; note = 2'-O-methylguanosine-3'-phosphate
  modified_base 9: mod_base = OTHER; note = 2'-deoxy-2'-fluorouridine-3'-phosphate
  modified_base 10: mod_base = OTHER; note = 2'-deoxy-2'-fluorocytidine-3'-phosphate
  modified_base 11: mod_base = OTHER; note = 2'-deoxy-2'-fluorocytidine-3'-phosphate
  modified_base 12: mod_base = OTHER; note = 2'-O-methylcytidine-3'-phosphate
  modified_base 13: mod_base = OTHER; note = 2'-O-methylguanosine-3'-phosphate
  modified_base 14: mod_base = OTHER; note = 2'-O-methylguanosine-3'-phosphate
  modified_base 15: mod_base = OTHER; note = 2'-O-methylguanosine-3'-phosphate
  modified_base 16: mod_base = OTHER; note = 2'-O-methyladenosine-3'-phosphate
  modified_base 17: mod_base = OTHER; note = 2'-O-methylguanosine-3'-phosphate
  modified_base 18: mod_base = OTHER; note = 2'-O-methylguanosine-3'-phosphate
  modified_base 19: mod_base = OTHER; note = 2'-O-methylcytidine-3'-phosphate
  modified_base 20: mod_base = OTHER; note = 2'-O-methylguanosine-3'-phosphate
  modified_base 21: mod_base = OTHER; note = 2'-O-methyladenosine-3'-phosphate ((2S,4R)-1-[29-[[2-(acetylamino)-2-deoxy-beta-D-galactopyra nosyl]oxy]-14,14-bis[[3-[[3-[[5-[[2-(acetylamino)-2-deoxy-b eta-D-galactopyranosyl]oxy]-1-oxopentyl]amino]propyl]amino] -3-oxopropoxy]methyl]-1,12,19,25-tetraoxo-16-oxa-13,20,24-t riazanonacos-1-yl]-4-hydroxy-2-pyrrolidinyl)methyl ester
caaacacgtcccgggaggcga

SEQ ID NO: 243 - RNA, 21 nt, synthetic construct
  source 1..21: mol_type = other RNA
  modified_base 1: mod_base = OTHER; note = 2'-O-methyladenosine-3'-phosphorothioate
  modified_base 2: mod_base = OTHER; note = 2'-O-methyladenosine-3'-phosphorothioate
  modified_base 3: mod_base = OTHER; note = 2'-O-methyladenosine-3'-phosphate
  modified_base 4: mod_base = OTHER; note = 2'-O-methylcytidine-3'-phosphate
  modified_base 5: mod_base = OTHER; note = 2'-O-methyladenosine-3'-phosphate
  modified_base 6: mod_base = OTHER; note = 2'-O-hexadecyl-cytidine-3'-phosphate
  modified_base 7: mod_base = OTHER; note = 2'-O-methylguanosine-3'-phosphate
  modified_base 8: mod_base = OTHER; note = 2'-O-methyluridine-3'-phosphate
  modified_base 9: mod_base = OTHER; note = 2'-deoxy-2'-fluorocytidine-3'-phosphate
  modified_base 10: mod_base = OTHER; note = 2'-deoxy-2'-fluorocytidine-3'-phosphate
  modified_base 11: mod_base = OTHER; note = 2'-deoxy-2'-fluorocytidine-3'-phosphate
  modified_base 12: mod_base = OTHER; note = 2'-O-methylguanosine-3'-phosphate
  modified_base 13: mod_base = OTHER; note = 2'-O-methylguanosine-3'-phosphate
  modified_base 14: mod_base = OTHER; note = 2'-O-methylguanosine-3'-phosphate
  modified_base 15: mod_base = OTHER; note = 2'-O-methyladenosine-3'-phosphate
  modified_base 16: mod_base = OTHER; note = 2'-O-methylguanosine-3'-phosphate
  modified_base 17: mod_base = OTHER; note = 2'-O-methylguanosine-3'-phosphate
  modified_base 18: mod_base = OTHER; note = 2'-O-methylcytidine-3'-phosphate
  modified_base 19: mod_base = OTHER; note = 2'-O-methylguanosine-3'-phosphate
  modified_base 20: mod_base = OTHER; note = 2'-O-methylguanosine-3'-phosphate
  modified_base 21: mod_base = OTHER; note = 2'-O-methyladenosine-3'-phosphate ((2S,4R)-1-[29-[[2-(acetylamino)-2-deoxy-beta-D-galactopyra nosyl]oxy]-14,14-bis[[3-[[3-[[5-[[2-(acetylamino)-2-deoxy-b eta-D-galactopyranosyl]oxy]-1-oxopentyl]amino]propyl]amino] -3-oxopropoxy]methyl]-1,12,19,25-tetraoxo-16-oxa-13,20,24-t riazanonacos-1-yl]-4-hydroxy-2-pyrrolidinyl)methyl ester
aaacacgtcccgggaggcgga

SEQ ID NO: 244 - RNA, 21 nt, synthetic construct
  source 1..21: mol_type = other RNA
  modified_base 1: mod_base = OTHER; note = 2'-O-methyladenosine-3'-phosphorothioate
  modified_base 2: mod_base = OTHER; note = 2'-O-methyladenosine-3'-phosphorothioate
  modified_base 3: mod_base = OTHER; note = 2'-O-methyladenosine-3'-phosphate
  modified_base 4: mod_base = OTHER; note = 2'-O-methylcytidine-3'-phosphate
  modified_base 5: mod_base = OTHER; note = 2'-O-methyladenosine-3'-phosphate
  modified_base 6: mod_base = OTHER; note = 2'-O-hexadecyl-cytidine-3'-phosphate
  modified_base 7: mod_base = OTHER; note = 2'-O-methylguanosine-3'-phosphate
  modified_base 8: mod_base = OTHER; note = 2'-O-methyluridine-3'-phosphate
  modified_base 9: mod_base = OTHER; note = 2'-deoxy-2'-fluorocytidine-3'-phosphate
  modified_base 10: mod_base = OTHER; note = 2'-deoxy-2'-fluorocytidine-3'-phosphate
  modified_base 11: mod_base = OTHER; note = 2'-deoxy-2'-fluorocytidine-3'-phosphate
  modified_base 12: mod_base = OTHER; note = 2'-O-methylguanosine-3'-phosphate
  modified_base 13: mod_base = OTHER; note = 2'-O-methylguanosine-3'-phosphate
  modified_base 14: mod_base = OTHER; note = 2'-O-methylguanosine-3'-phosphate
  modified_base 15: mod_base = OTHER; note = 2'-O-methyladenosine-3'-phosphate
  modified_base 16: mod_base = OTHER; note = 2'-O-methylguanosine-3'-phosphate
  modified_base 17: mod_base = OTHER; note = 2'-O-methylguanosine-3'-phosphate
  modified_base 18: mod_base = OTHER; note = 2'-O-methylcytidine-3'-phosphate
  modified_base 19: mod_base = OTHER; note = 2'-O-methylguanosine-3'-phosphate
  modified_base 20: mod_base = OTHER; note = 2'-O-methylguanosine-3'-phosphate
  modified_base 21: mod_base = OTHER; note = 2'-O-methyladenosine-3'-phosphate ((2S,4R)-1-[29-[[2-(acetylamino)-2-deoxy-beta-D-galactopyra nosyl]oxy]-14,14-bis[[3-[[3-[[5-[[2-(acetylamino)-2-deoxy-b eta-D-galactopyranosyl]oxy]-1-oxopentyl]amino]propyl]amino] -3-oxopropoxy]methyl]-1,12,19,25-tetraoxo-16-oxa-13,20,24-t riazanonacos-1-yl]-4-hydroxy-2-pyrrolidinyl)methyl ester
aaacacgtcccgggaggcgga

SEQ ID NO: 245 - RNA, 21 nt, synthetic construct
  source 1..21: mol_type = other RNA
  modified_base 1: mod_base = OTHER; note = 2'-O-methyladenosine-3'-phosphorothioate
  modified_base 2: mod_base = OTHER; note = 2'-O-methyladenosine-3'-phosphorothioate
  modified_base 3: mod_base = OTHER; note = 2'-O-methylcytidine-3'-phosphate
  modified_base 4: mod_base = OTHER; note = 2'-O-methyladenosine-3'-phosphate
  modified_base 5: mod_base = OTHER; note = 2'-O-methylcytidine-3'-phosphate
  modified_base 6: mod_base = OTHER; note = 2'-O-hexadecyl-guanosine-3'-phosphate
  modified_base 7: mod_base = OTHER; note = 2'-O-methyluridine-3'-phosphate
  modified_base 8: mod_base = OTHER; note = 2'-O-methylcytidine-3'-phosphate
  modified_base 9: mod_base = OTHER; note = 2'-deoxy-2'-fluorocytidine-3'-phosphate
  modified_base 10: mod_base = OTHER; note = 2'-deoxy-2'-fluorocytidine-3'-phosphate
  modified_base 11: mod_base = OTHER; note = 2'-deoxy-2'-fluoroguanosine-3'-phosphate
  modified_base 12: mod_base = OTHER; note = 2'-O-methylguanosine-3'-phosphate
  modified_base 13: mod_base = OTHER; note = 2'-O-methylguanosine-3'-phosphate
  modified_base 14: mod_base = OTHER; note = 2'-O-methyladenosine-3'-phosphate
  modified_base 15: mod_base = OTHER; note = 2'-O-methylguanosine-3'-phosphate
  modified_base 16: mod_base = OTHER; note = 2'-O-methylguanosine-3'-phosphate
  modified_base 17: mod_base = OTHER; note = 2'-O-methylcytidine-3'-phosphate
  modified_base 18: mod_base = OTHER; note = 2'-O-methylguanosine-3'-phosphate
  modified_base 19: mod_base = OTHER; note = 2'-O-methylguanosine-3'-phosphate
  modified_base 20: mod_base = OTHER; note = 2'-O-methylcytidine-3'-phosphate
  modified_base 21: mod_base = OTHER; note = 2'-O-methyladenosine-3'-phosphate ((2S,4R)-1-[29-[[2-(acetylamino)-2-deoxy-beta-D-galactopyra nosyl]oxy]-14,14-bis[[3-[[3-[[5-[[2-(acetylamino)-2-deoxy-b eta-D-galactopyranosyl]oxy]-1-oxopentyl]amino]propyl]amino] -3-oxopropoxy]methyl]-1,12,19,25-tetraoxo-16-oxa-13,20,24-t riazanonacos-1-yl]-4-hydroxy-2-pyrrolidinyl)methyl ester
aacacgtcccgggaggcggca

SEQ ID NO: 246 - RNA, 21 nt, synthetic construct
  source 1..21: mol_type = other RNA
  modified_base 1: mod_base = OTHER; note = 2'-O-methyladenosine-3'-phosphorothioate
  modified_base 2: mod_base = OTHER; note = 2'-O-methyladenosine-3'-phosphorothioate
  modified_base 3: mod_base = OTHER; note = 2'-O-methylcytidine-3'-phosphate
  modified_base 4: mod_base = OTHER; note = 2'-O-methyladenosine-3'-phosphate
  modified_base 5: mod_base = OTHER; note = 2'-O-methylcytidine-3'-phosphate
  modified_base 6: mod_base = OTHER; note = 2'-O-hexadecyl-guanosine-3'-phosphate
  modified_base 7: mod_base = OTHER; note = 2'-O-methyluridine-3'-phosphate
  modified_base 8: mod_base = OTHER; note = 2'-O-methylcytidine-3'-phosphate
  modified_base 9: mod_base = OTHER; note = 2'-deoxy-2'-fluorocytidine-3'-phosphate
  modified_base 10: mod_base = OTHER; note = 2'-deoxy-2'-fluorocytidine-3'-phosphate
  modified_base 11: mod_base = OTHER; note = 2'-deoxy-2'-fluoroguanosine-3'-phosphate
  modified_base 12: mod_base = OTHER; note = 2'-O-methylguanosine-3'-phosphate
  modified_base 13: mod_base = OTHER; note = 2'-O-methylguanosine-3'-phosphate
  modified_base 14: mod_base = OTHER; note = 2'-O-methyladenosine-3'-phosphate
  modified_base 15: mod_base = OTHER; note = 2'-O-methylguanosine-3'-phosphate
  modified_base 16: mod_base = OTHER; note = 2'-O-methylguanosine-3'-phosphate
  modified_base 17: mod_base = OTHER; note = 2'-O-methylcytidine-3'-phosphate
  modified_base 18: mod_base = OTHER; note = 2'-O-methylguanosine-3'-phosphate
  modified_base 19: mod_base = OTHER; note = 2'-O-methylguanosine-3'-phosphate
  modified_base 20: mod_base = OTHER; note = 2'-O-methylcytidine-3'-phosphate
  modified_base 21: mod_base = OTHER; note = 2'-O-methyladenosine-3'-phosphate ((2S,4R)-1-[29-[[2-(acetylamino)-2-deoxy-beta-D-galactopyra nosyl]oxy]-14,14-bis[[3-[[3-[[5-[[2-(acetylamino)-2-deoxy-b eta-D-galactopyranosyl]oxy]-1-oxopentyl]amino]propyl]amino] -3-oxopropoxy]methyl]-1,12,19,25-tetraoxo-16-oxa-13,20,24-t riazanonacos-1-yl]-4-hydroxy-2-pyrrolidinyl)methyl ester
aacacgtcccgggaggcggca

SEQ ID NO: 247 - RNA, 21 nt, synthetic construct
  source 1..21: mol_type = other RNA
  modified_base 1: mod_base = OTHER; note = 2'-O-methyladenosine-3'-phosphorothioate
  modified_base 2: mod_base = OTHER; note = 2'-O-methylcytidine-3'-phosphorothioate
  modified_base 3: mod_base = OTHER; note = 2'-O-methyladenosine-3'-phosphate
  modified_base 4: mod_base = OTHER; note = 2'-O-methylcytidine-3'-phosphate
  modified_base 5: mod_base = OTHER; note = 2'-O-methylguanosine-3'-phosphate
  modified_base 6: mod_base = OTHER; note = 2'-O-hexadecyl-uridine-3'-phosphate
  modified_base 7: mod_base = OTHER; note = 2'-O-methylcytidine-3'-phosphate
  modified_base 8: mod_base = OTHER; note = 2'-O-methylcytidine-3'-phosphate
  modified_base 9: mod_base = OTHER; note = 2'-deoxy-2'-fluorocytidine-3'-phosphate
  modified_base 10: mod_base = OTHER; note = 2'-deoxy-2'-fluoroguanosine-3'-phosphate
  modified_base 11: mod_base = OTHER; note = 2'-deoxy-2'-fluoroguanosine-3'-phosphate
  modified_base 12: mod_base = OTHER; note = 2'-O-methylguanosine-3'-phosphate
  modified_base 13: mod_base = OTHER; note = 2'-O-methyladenosine-3'-phosphate
  modified_base 14: mod_base = OTHER; note = 2'-O-methylguanosine-3'-phosphate
  modified_base 15: mod_base = OTHER; note = 2'-O-methylguanosine-3'-phosphate
  modified_base 16: mod_base = OTHER; note = 2'-O-methylcytidine-3'-phosphate
  modified_base 17: mod_base = OTHER; note = 2'-O-methylguanosine-3'-phosphate
  modified_base 18: mod_base = OTHER; note = 2'-O-methylguanosine-3'-phosphate
  modified_base 19: mod_base = OTHER; note = 2'-O-methylcytidine-3'-phosphate
  modified_base 20: mod_base = OTHER; note = 2'-O-methyladenosine-3'-phosphate
  modified_base 21: mod_base = OTHER; note = 2'-O-methyladenosine-3'-phosphate ((2S,4R)-1-[29-[[2-(acetylamino)-2-deoxy-beta-D-galactopyra nosyl]oxy]-14,14-bis[[3-[[3-[[5-[[2-(acetylamino)-2-deoxy-b eta-D-galactopyranosyl]oxy]-1-oxopentyl]amino]propyl]amino] -3-oxopropoxy]methyl]-1,12,19,25-tetraoxo-16-oxa-13,20,24-t riazanonacos-1-yl]-4-hydroxy-2-pyrrolidinyl)methyl ester
acacgtcccgggaggcggcaa

SEQ ID NO: 248 - RNA, 21 nt, synthetic construct
  source 1..21: mol_type = other RNA
  modified_base 1: mod_base = OTHER; note = 2'-O-methylcytidine-3'-phosphorothioate
  modified_base 2: mod_base = OTHER; note = 2'-O-methyladenosine-3'-phosphorothioate
  modified_base 3: mod_base = OTHER; note = 2'-O-methylcytidine-3'-phosphate
  modified_base 4: mod_base = OTHER; note = 2'-O-methylguanosine-3'-phosphate
  modified_base 5: mod_base = OTHER; note = 2'-O-methyluridine-3'-phosphate
  modified_base 6: mod_base = OTHER; note = 2'-O-hexadecyl-cytidine-3'-phosphate
  modified_base 7: mod_base = OTHER; note = 2'-O-methylcytidine-3'-phosphate
  modified_base 8: mod_base = OTHER; note = 2'-O-methylcytidine-3'-phosphate
  modified_base 9: mod_base = OTHER; note = 2'-deoxy-2'-fluoroguanosine-3'-phosphate
  modified_base 10: mod_base = OTHER; note = 2'-deoxy-2'-fluoroguanosine-3'-phosphate
  modified_base 11: mod_base = OTHER; note = 2'-deoxy-2'-fluoroguanosine-3'-phosphate
  modified_base 12: mod_base = OTHER; note = 2'-O-methyladenosine-3'-phosphate
  modified_base 13: mod_base = OTHER; note = 2'-O-methylguanosine-3'-phosphate
  modified_base 14: mod_base = OTHER; note = 2'-O-methylguanosine-3'-phosphate
  modified_base 15: mod_base = OTHER; note = 2'-O-methylcytidine-3'-phosphate
  modified_base 16: mod_base = OTHER; note = 2'-O-methylguanosine-3'-phosphate
  modified_base 17: mod_base = OTHER; note = 2'-O-methylguanosine-3'-phosphate
  modified_base 18: mod_base = OTHER; note = 2'-O-methylcytidine-3'-phosphate
  modified_base 19: mod_base = OTHER; note = 2'-O-methyladenosine-3'-phosphate
  modified_base 20: mod_base = OTHER; note = 2'-O-methylguanosine-3'-phosphate
  modified_base 21: mod_base = OTHER; note = 2'-O-methyladenosine-3'-phosphate ((2S,4R)-1-[29-[[2-(acetylamino)-2-deoxy-beta-D-galactopyra nosyl]oxy]-14,14-bis[[3-[[3-[[5-[[2-(acetylamino)-2-deoxy-b eta-D-galactopyranosyl]oxy]-1-oxopentyl]amino]propyl]amino] -3-oxopropoxy]methyl]-1,12,19,25-tetraoxo-16-oxa-13,20,24-t riazanonacos-1-yl]-4-hydroxy-2-pyrrolidinyl)methyl ester
cacgtcccgggaggcggcaga

SEQ ID NO: 249 - DNA, 23 bp, synthetic construct
  source 1..23: mol_type = other DNA
  modified_base 1: mod_base = OTHER; note = 2'-O-methyluridine-3'-phosphorothioate 5'-(E)-Vinylphosphonate
  modified_base 2: mod_base = OTHER; note = 2'-deoxyguanosine-3'-phosphorothioate
  modified_base 3: mod_base = OTHER; note = 2'-O-methylcytidine-3'-phosphate
  modified_base 4: mod_base = OTHER; note = 2'-O-methyluridine-3'-phosphate
  modified_base 6: mod_base = OTHER; note = 2'-O-methylcytidine-3'-phosphate
  modified_base 7: mod_base = OTHER; note = Thymidine-glycol nucleic acid (GNA), S-Isomer
  modified_base 8: mod_base = OTHER; note = 2'-O-methyluridine-3'-phosphate
  modified_base 9: mod_base = OTHER; note = 2'-O-methyladenosine-3'-phosphate
  modified_base 10: mod_base = OTHER; note = 2'-O-methyluridine-3'-phosphate
  modified_base 11: mod_base = OTHER; note = 2'-O-methyluridine-3'-phosphate
  modified_base 13: mod_base = OTHER; note = 2'-O-methyladenosine-3'-phosphate
  modified_base 14: mod_base = OTHER; note = 2'-deoxy-2'-fluorouridine-3'-phosphate
  modified_base 15: mod_base = OTHER; note = 2'-O-methyluridine-3'-phosphate
  modified_base 16: mod_base = OTHER; note = 2'-O-methyladenosine-3'-phosphate
  modified_base 17: mod_base = OTHER; note = 2'-O-methyluridine-3'-phosphate
  modified_base 18: mod_base = OTHER; note = 2'-O-methylcytidine-3'-phosphate
  modified_base 19: mod_base = OTHER; note = 2'-O-methyluridine-3'-phosphate
  modified_base 20: mod_base = OTHER; note = 2'-O-methylguanosine-3'-phosphate
  modified_base 21: mod_base = OTHER; note = 2'-O-methylcytidine-3'-phosphorothioate
  modified_base 22: mod_base = OTHER; note = 2'-O-methyladenosine-3'-phosphorothioate
  modified_base 23: mod_base = OTHER; note = 2'-O-methylcytidine
  misc_feature 1: note = RNA
  misc_feature 3..4: note = RNA
  misc_feature 6..11: note = RNA
  misc_feature 13..23: note = RNA
  misc_feature 2: note = DNA
  misc_feature 5: note = DNA
  misc_feature 12: note = DNA
tgcttcttattaattatctgcac

SEQ ID NO: 250 - DNA, 23 bp, synthetic construct
  source 1..23: mol_type = other DNA
  modified_base 1: mod_base = OTHER; note = 2'-O-methyluridine-3'-phosphorothioate 5'-(E)-Vinylphosphonate
  modified_base 2: mod_base = OTHER; note = 2'-deoxyadenosine-3'-phosphorothioate
  modified_base 3: mod_base = OTHER; note = 2'-O-methylguanosine-3'-phosphate
  modified_base 4: mod_base = OTHER; note = 2'-O-methylcytidine-3'-phosphate
  modified_base 6: mod_base = OTHER; note = 2'-O-methyluridine-3'-phosphate
  modified_base 7: mod_base = OTHER; note = cytidine-2'-phosphate
  modified_base 8: mod_base = OTHER; note = 2'-O-methyluridine-3'-phosphate
  modified_base 9: mod_base = OTHER; note = 2'-O-methyluridine-3'-phosphate
  modified_base 10: mod_base = OTHER; note = 2'-O-methyladenosine-3'-phosphate
  modified_base 11: mod_base = OTHER; note = 2'-O-methyluridine-3'-phosphate
  modified_base 13: mod_base = OTHER; note = 2'-O-methyladenosine-3'-phosphate
  modified_base 14: mod_base = OTHER; note = 2'-deoxy-2'-fluoroadenosine-3'-phosphate
  modified_base 15: mod_base = OTHER; note = 2'-O-methyluridine-3'-phosphate
  modified_base 16: mod_base = OTHER; note = 2'-O-methyluridine-3'-phosphate
  modified_base 17: mod_base = OTHER; note = 2'-O-methyladenosine-3'-phosphate
  modified_base 18: mod_base = OTHER; note = 2'-O-methyluridine-3'-phosphate
  modified_base 19: mod_base = OTHER; note = 2'-O-methylcytidine-3'-phosphate
  modified_base 20: mod_base = OTHER; note = 2'-O-methyluridine-3'-phosphate
  modified_base 21: mod_base = OTHER; note = 2'-O-methylguanosine-3'-phosphorothioate
  modified_base 22: mod_base = OTHER; note = 2'-O-methylcytidine-3'-phosphorothioate
  modified_base 23: mod_base = OTHER; note = 2'-O-methyladenosine
  misc_feature 1: note = RNA
  misc_feature 3..4: note = RNA
  misc_feature 6..11: note = RNA
  misc_feature 13..23: note = RNA
  misc_feature 2: note = DNA
  misc_feature 5: note = DNA
  misc_feature 12: note = DNA
tagcttcttattaattatctgca

SEQ ID NO: 251 - DNA, 23 bp, synthetic construct
  source 1..23: mol_type = other DNA
  modified_base 1: mod_base = OTHER; note = 2'-O-methyluridine-3'-phosphorothioate 5'-(E)-Vinylphosphonate
  modified_base 2: mod_base = OTHER; note = 2'-deoxycytidine-3'-phosphorothioate
  modified_base 3: mod_base = OTHER; note = 2'-O-methyladenosine-3'-phosphate
  modified_base 4: mod_base = OTHER; note = 2'-O-methylguanosine-3'-phosphate
  modified_base 6: mod_base = OTHER; note = 2'-O-methyluridine-3'-phosphate
  modified_base 8: mod_base = OTHER; note = 2'-O-methylcytidine-3'-phosphate
  modified_base 9: mod_base = OTHER; note = 2'-O-methyluridine-3'-phosphate
  modified_base 10: mod_base = OTHER; note = 2'-O-methyluridine-3'-phosphate
  modified_base 11: mod_base = OTHER; note = 2'-O-methyladenosine-3'-phosphate
  modified_base 13: mod_base = OTHER; note = 2'-O-methyluridine-3'-phosphate
  modified_base 14: mod_base = OTHER; note = 2'-deoxy-2'-fluoroadenosine-3'-phosphate
  modified_base 15: mod_base = OTHER; note = 2'-O-methyladenosine-3'-phosphate
  modified_base 16: mod_base = OTHER; note = 2'-O-methyluridine-3'-phosphate
  modified_base 17: mod_base = OTHER; note = 2'-O-methyluridine-3'-phosphate
  modified_base 18: mod_base = OTHER; note = 2'-O-methyladenosine-3'-phosphate
  modified_base 19: mod_base = OTHER; note = 2'-O-methyluridine-3'-phosphate
  modified_base 20: mod_base = OTHER; note = 2'-O-methylcytidine-3'-phosphate
  modified_base 21: mod_base = OTHER; note = 2'-O-methyluridine-3'-phosphorothioate
  modified_base 22: mod_base = OTHER; note = 2'-O-methylguanosine-3'-phosphorothioate
  modified_base 23: mod_base = OTHER; note = 2'-O-methylcytidine
  misc_feature 1: note = RNA
  misc_feature 3..4: note = RNA
  misc_feature 6: note = RNA
  misc_feature 8..11: note = RNA
  misc_feature 13..23: note = RNA
  misc_feature 2: note = DNA
  misc_feature 5: note = DNA
  misc_feature 7: note = DNA
  misc_feature 12: note = DNA
tcagcttcttattaattatctgc

SEQ ID NO: 252 - DNA, 23 bp, synthetic construct
  source 1..23: mol_type = other DNA
  modified_base 1: mod_base = OTHER; note = 2'-O-methyluridine-3'-phosphorothioate 5'-(E)-Vinylphosphonate
  modified_base 2: mod_base = OTHER; note = 2'-deoxycytidine-3'-phosphorothioate
  modified_base 3: mod_base = OTHER; note = 2'-O-methylcytidine-3'-phosphate
  modified_base 4: mod_base = OTHER; note = 2'-O-methyladenosine-3'-phosphate
  modified_base 6: mod_base = OTHER; note = 2'-O-methylcytidine-3'-phosphate
  modified_base 7: mod_base = OTHER; note = Thymidine-glycol nucleic acid (GNA), S-Isomer
  modified_base 8: mod_base = OTHER; note = 2'-O-methyluridine-3'-phosphate
  modified_base 9: mod_base = OTHER; note = 2'-O-methylcytidine-3'-phosphate
  modified_base 10: mod_base = OTHER; note = 2'-O-methyluridine-3'-phosphate
  modified_base 11: mod_base = OTHER; note = 2'-O-methyluridine-3'-phosphate
  modified_base 13: mod_base = OTHER; note = 2'-O-methyluridine-3'-phosphate
  modified_base 14: mod_base = OTHER; note = 2'-deoxy-2'-fluorouridine-3'-phosphate
  modified_base 15: mod_base = OTHER; note = 2'-O-methyladenosine-3'-phosphate
  modified_base 16: mod_base = OTHER; note = 2'-O-methyladenosine-3'-phosphate
  modified_base 17: mod_base = OTHER; note = 2'-O-methyluridine-3'-phosphate
  modified_base 18: mod_base = OTHER; note = 2'-O-methyluridine-3'-phosphate
  modified_base 19: mod_base = OTHER; note = 2'-O-methyladenosine-3'-phosphate
  modified_base 20: mod_base = OTHER; note = 2'-O-methyluridine-3'-phosphate
  modified_base 21: mod_base = OTHER; note = 2'-O-methylcytidine-3'-phosphorothioate
  modified_base 22: mod_base = OTHER; note = 2'-O-methyluridine-3'-phosphorothioate
  modified_base 23: mod_base = OTHER; note = 2'-O-methylguanosine
  misc_feature 1: note = RNA
  misc_feature 3..4: note = RNA
  misc_feature 6..11: note = RNA
  misc_feature 13..23: note = RNA
  misc_feature 2: note = DNA
  misc_feature 5: note = DNA
  misc_feature 12: note = DNA
tccagcttcttattaattatctg

SEQ ID NO: 253 - DNA, 23 bp, synthetic construct
  source 1..23: mol_type = other DNA
  modified_base 1: mod_base = OTHER; note = 2'-O-methyluridine-3'-phosphorothioate 5'-(E)-Vinylphosphonate
  modified_base 2: mod_base = OTHER; note = 2'-deoxythymidine-3'-phosphorothioate
  modified_base 3: mod_base = OTHER; note = 2'-O-methylcytidine-3'-phosphate
  modified_base 4: mod_base = OTHER; note = 2'-O-methylcytidine-3'-phosphate
  modified_base 6: mod_base = OTHER; note = 2'-O-methylguanosine-3'-phosphate
  modified_base 7: mod_base = OTHER; note = cytidine-2'-phosphate
  modified_base 8: mod_base = OTHER; note = 2'-O-methyluridine-3'-phosphate
  modified_base 9: mod_base = OTHER; note = 2'-O-methyluridine-3'-phosphate
  modified_base 10: mod_base = OTHER; note = 2'-O-methylcytidine-3'-phosphate
  modified_base 11: mod_base = OTHER; note = 2'-O-methyluridine-3'-phosphate
  modified_base 13: mod_base = OTHER; note = 2'-O-methyladenosine-3'-phosphate
  modified_base 14: mod_base = OTHER; note = 2'-deoxy-2'-fluorouridine-3'-phosphate
  modified_base 15: mod_base = OTHER; note = 2'-O-methyluridine-3'-phosphate
  modified_base 16: mod_base = OTHER; note = 2'-O-methyladenosine-3'-phosphate
  modified_base 17: mod_base = OTHER; note = 2'-O-methyladenosine-3'-phosphate
  modified_base 18: mod_base = OTHER; note = 2'-O-methyluridine-3'-phosphate
  modified_base 19: mod_base = OTHER; note = 2'-O-methyluridine-3'-phosphate
  modified_base 20: mod_base = OTHER; note = 2'-O-methyladenosine-3'-phosphate
  modified_base 21: mod_base = OTHER; note = 2'-O-methyluridine-3'-phosphorothioate
  modified_base 22: mod_base = OTHER; note = 2'-O-methylcytidine-3'-phosphorothioate
  modified_base 23: mod_base = OTHER; note = 2'-O-methyluridine
  misc_feature 1: note = RNA
  misc_feature 3..4: note = RNA
  misc_feature 6..11: note = RNA
  misc_feature 13..23: note = RNA
  misc_feature 2: note = DNA
  misc_feature 5: note = DNA
  misc_feature 12: note = DNA
ttccagcttcttattaattatct

SEQ ID NO: 254 - DNA, 23 bp, synthetic construct
  source 1..23: mol_type = other DNA
  modified_base 1: mod_base = OTHER; note = 2'-O-methyluridine-3'-phosphorothioate 5'-(E)-Vinylphosphonate
  modified_base 2: mod_base = OTHER; note = 2'-deoxyadenosine-3'-phosphorothioate
  modified_base 3: mod_base = OTHER; note = 2'-O-methyluridine-3'-phosphate
  modified_base 4: mod_base = OTHER; note = 2'-O-methylcytidine-3'-phosphate
  modified_base 6: mod_base = OTHER; note = 2'-O-methyladenosine-3'-phosphate
  modified_base 7: mod_base = OTHER; note = guanosine-2'-phosphate
  modified_base 8: mod_base = OTHER; note = 2'-O-methylcytidine-3'-phosphate
  modified_base 9: mod_base = OTHER; note = 2'-O-methyluridine-3'-phosphate
  modified_base 10: mod_base = OTHER; note = 2'-O-methyluridine-3'-phosphate
  modified_base 11: mod_base = OTHER; note = 2'-O-methylcytidine-3'-phosphate
  modified_base 13: mod_base = OTHER; note = 2'-O-methyluridine-3'-phosphate
  modified_base 14: mod_base = OTHER; note = 2'-deoxy-2'-fluoroadenosine-3'-phosphate
  modified_base 15: mod_base = OTHER; note = 2'-O-methyluridine-3'-phosphate
  modified_base 16: mod_base = OTHER; note = 2'-O-methyluridine-3'-phosphate
  modified_base 17: mod_base = OTHER; note = 2'-O-methyladenosine-3'-phosphate
  modified_base 18: mod_base = OTHER; note = 2'-O-methyladenosine-3'-phosphate
  modified_base 19: mod_base = OTHER; note = 2'-O-methyluridine-3'-phosphate
  modified_base 20: mod_base = OTHER; note = 2'-O-methyluridine-3'-phosphate
  modified_base 21: mod_base = OTHER; note = 2'-O-methyladenosine-3'-phosphorothioate
  modified_base 22: mod_base = OTHER; note = 2'-O-methyluridine-3'-phosphorothioate
  modified_base 23: mod_base = OTHER; note = 2'-O-methylcytidine
  misc_feature 1: note = RNA
  misc_feature 3..4: note = RNA
  misc_feature 6..11: note = RNA
  misc_feature 13..23: note = RNA
  misc_feature 2: note = DNA
  misc_feature 5: note = DNA
  misc_feature 12: note = DNA
tatccagcttcttattaattatc

SEQ ID NO: 255 - DNA, 23 bp, synthetic construct
  source 1..23: mol_type = other DNA
  modified_base 1: mod_base = OTHER; note = 2'-O-methyluridine-3'-phosphorothioate 5'-(E)-Vinylphosphonate
  modified_base 2: mod_base = OTHER; note = 2'-deoxyguanosine-3'-phosphorothioate
  modified_base 3: mod_base = OTHER; note = 2'-O-methyladenosine-3'-phosphate
  modified_base 4: mod_base = OTHER; note = 2'-O-methyluridine-3'-phosphate
  modified_base 6: mod_base = OTHER; note = 2'-O-methylcytidine-3'-phosphate
  modified_base 7: mod_base = OTHER; note = Adenosine-glycol nucleic acid (GNA), S-isomer
  modified_base 8: mod_base = OTHER; note = 2'-O-methylguanosine-3'-phosphate
  modified_base 9: mod_base = OTHER; note = 2'-O-methylcytidine-3'-phosphate
  modified_base 10: mod_base = OTHER; note = 2'-O-methyluridine-3'-phosphate
  modified_base 11: mod_base = OTHER; note = 2'-O-methyluridine-3'-phosphate
  modified_base 13: mod_base = OTHER; note = 2'-O-methyluridine-3'-phosphate
  modified_base 14: mod_base = OTHER; note = 2'-deoxy-2'-fluorouridine-3'-phosphate
  modified_base 15: mod_base = OTHER; note = 2'-O-methyladenosine-3'-phosphate
  modified_base 16: mod_base = OTHER; note = 2'-O-methyluridine-3'-phosphate
  modified_base 17: mod_base = OTHER; note = 2'-O-methyluridine-3'-phosphate
  modified_base 18: mod_base = OTHER; note = 2'-O-methyladenosine-3'-phosphate
  modified_base 19: mod_base = OTHER; note = 2'-O-methyladenosine-3'-phosphate
  modified_base 20: mod_base = OTHER; note = 2'-O-methyluridine-3'-phosphate
  modified_base 21: mod_base = OTHER; note = 2'-O-methyluridine-3'-phosphorothioate
  modified_base 22: mod_base = OTHER; note = 2'-O-methyladenosine-3'-phosphorothioate
  modified_base 23: mod_base = OTHER; note = 2'-O-methyluridine
  misc_feature 1: note = RNA
  misc_feature 3..4: note = RNA
  misc_feature 6..11: note = RNA
  misc_feature 13..23: note = RNA
  misc_feature 2: note = DNA
  misc_feature 5: note = DNA
  misc_feature 12: note = DNA
tgatccagcttcttattaattat

SEQ ID NO: 256 - DNA, 23 bp, synthetic construct
  source 1..23: mol_type = other DNA
  modified_base 1: mod_base = OTHER; note = 2'-O-methyluridine-3'-phosphorothioate 5'-(E)-Vinylphosphonate
  modified_base 2: mod_base = OTHER; note = 2'-deoxyadenosine-3'-phosphorothioate
  modified_base 3: mod_base = OTHER; note = 2'-O-methylguanosine-3'-phosphate
  modified_base 4: mod_base = OTHER; note = 2'-O-methyladenosine-3'-phosphate
  modified_base 6: mod_base = OTHER; note = 2'-O-methylcytidine-3'-phosphate
  modified_base 7: mod_base = OTHER; note = cytidine-2'-phosphate
  modified_base 8: mod_base = OTHER; note = 2'-O-methyladenosine-3'-phosphate
  modified_base 9: mod_base = OTHER; note = 2'-O-methylguanosine-3'-phosphate
  modified_base 10: mod_base = OTHER; note = 2'-O-methylcytidine-3'-phosphate
  modified_base 11: mod_base = OTHER; note = 2'-O-methyluridine-3'-phosphate
  modified_base 13: mod_base = OTHER; note = 2'-O-methylcytidine-3'-phosphate
  modified_base 14: mod_base = OTHER; note = 2'-deoxy-2'-fluorouridine-3'-phosphate
  modified_base 15: mod_base = OTHER; note = 2'-O-methyluridine-3'-phosphate
  modified_base 16: mod_base = OTHER; note = 2'-O-methyladenosine-3'-phosphate
  modified_base 17: mod_base = OTHER; note = 2'-O-methyluridine-3'-phosphate
  modified_base 18: mod_base = OTHER; note = 2'-O-methyluridine-3'-phosphate
  modified_base 19: mod_base = OTHER; note = 2'-O-methyladenosine-3'-phosphate
  modified_base 20: mod_base = OTHER; note = 2'-O-methyladenosine-3'-phosphate
  modified_base 21: mod_base = OTHER; note = 2'-O-methyluridine-3'-phosphorothioate
  modified_base 22: mod_base = OTHER; note = 2'-O-methyluridine-3'-phosphorothioate
  modified_base 23: mod_base = OTHER; note = 2'-O-methyladenosine
  misc_feature 1: note = RNA
  misc_feature 3..4: note = RNA
  misc_feature 6..11: note = RNA
  misc_feature 13..23: note = RNA
  misc_feature 2: note = DNA
  misc_feature 5: note = DNA
  misc_feature 12: note = DNA
tagatccagcttcttattaatta

SEQ ID NO: 257 - DNA, 23 bp, synthetic construct
  source 1..23: mol_type = other DNA
  modified_base 1: mod_base = OTHER; note = 2'-O-methyluridine-3'-phosphorothioate 5'-(E)-Vinylphosphonate
  modified_base 2: mod_base = OTHER; note = 2'-deoxyadenosine-3'-phosphorothioate
  modified_base 3: mod_base = OTHER; note = 2'-O-methyladenosine-3'-phosphate
  modified_base 4: mod_base = OTHER; note = 2'-O-methylguanosine-3'-phosphate
  modified_base 6: mod_base = OTHER; note = 2'-O-methyluridine-3'-phosphate
  modified_base 8: mod_base = OTHER; note = 2'-O-methylcytidine-3'-phosphate
  modified_base 9: mod_base = OTHER; note = 2'-O-methyladenosine-3'-phosphate
  modified_base 10: mod_base = OTHER; note = 2'-O-methylguanosine-3'-phosphate
  modified_base 11: mod_base = OTHER; note = 2'-O-methylcytidine-3'-phosphate
  modified_base 13: mod_base = OTHER; note = 2'-O-methyluridine-3'-phosphate
  modified_base 14: mod_base = OTHER; note = 2'-deoxy-2'-fluorocytidine-3'-phosphate
  modified_base 15: mod_base = OTHER; note = 2'-O-methyluridine-3'-phosphate
  modified_base 16: mod_base = OTHER; note = 2'-O-methyluridine-3'-phosphate
  modified_base 17: mod_base = OTHER; note = 2'-O-methyladenosine-3'-phosphate
  modified_base 18: mod_base = OTHER; note = 2'-O-methyluridine-3'-phosphate
  modified_base 19: mod_base = OTHER; note = 2'-O-methyluridine-3'-phosphate
  modified_base 20: mod_base = OTHER; note = 2'-O-methyladenosine-3'-phosphate
  modified_base 21: mod_base = OTHER; note = 2'-O-methyladenosine-3'-phosphorothioate
  modified_base 22: mod_base = OTHER; note = 2'-O-methyluridine-3'-phosphorothioate
  modified_base 23: mod_base = OTHER; note = 2'-O-methyluridine
  misc_feature 1: note = RNA
  misc_feature 3..4: note = RNA
  misc_feature 6: note = RNA
  misc_feature 8..11: note = RNA
  misc_feature 13..23: note = RNA
  misc_feature 2: note = DNA
  misc_feature 5: note = DNA
  misc_feature 7: note = DNA
  misc_feature 12: note = DNA
taagatccagcttcttattaatt

SEQ ID NO: 258 - DNA, 23 bp, synthetic construct
  source 1..23: mol_type = other DNA
  modified_base 1: mod_base = OTHER; note = 2'-O-methyluridine-3'-phosphorothioate 5'-(E)-Vinylphosphonate
  modified_base 2: mod_base = OTHER; note = 2'-deoxythymidine-3'-phosphorothioate
  modified_base 3: mod_base = OTHER; note = 2'-O-methyladenosine-3'-phosphate
  modified_base 4: mod_base = OTHER; note = 2'-O-methyladenosine-3'-phosphate
  modified_base 6: mod_base = OTHER; note = 2'-O-methyladenosine-3'-phosphate
  modified_base 7: mod_base = OTHER; note = Thymidine-glycol nucleic acid (GNA), S-Isomer
  modified_base 8: mod_base = OTHER; note = 2'-O-methylcytidine-3'-phosphate
  modified_base 9: mod_base = OTHER; note = 2'-O-methylcytidine-3'-phosphate
  modified_base 10: mod_base = OTHER; note = 2'-O-methyladenosine-3'-phosphate
  modified_base 11: mod_base = OTHER; note = 2'-O-methylguanosine-3'-phosphate
  modified_base 13: mod_base = OTHER; note = 2'-O-methyluridine-3'-phosphate
  modified_base 14: mod_base = OTHER; note = 2'-deoxy-2'-fluorouridine-3'-phosphate
  modified_base 15: mod_base = OTHER; note = 2'-O-methylcytidine-3'-phosphate
  modified_base 16: mod_base = OTHER; note = 2'-O-methyluridine-3'-phosphate
  modified_base 17: mod_base = OTHER; note = 2'-O-methyluridine-3'-phosphate
  modified_base 18: mod_base = OTHER; note = 2'-O-methyladenosine-3'-phosphate
  modified_base 19: mod_base = OTHER; note = 2'-O-methyluridine-3'-phosphate
  modified_base 20: mod_base = OTHER; note = 2'-O-methyluridine-3'-phosphate
  modified_base 21: mod_base = OTHER; note = 2'-O-methyladenosine-3'-phosphorothioate
  modified_base 22: mod_base = OTHER; note = 2'-O-methyladenosine-3'-phosphorothioate
  modified_base 23: mod_base = OTHER; note = 2'-O-methyluridine
  misc_feature 1: note = RNA
  misc_feature 3..4: note = RNA
  misc_feature 6..11: note = RNA
  misc_feature 13..23: note = RNA
  misc_feature 2: note = DNA
  misc_feature 5: note = DNA
  misc_feature 12: note = DNA
ttaagatccagcttcttattaat

SEQ ID NO: 259 - DNA, 23 bp, synthetic construct
  source 1..23: mol_type = other DNA
  modified_base 1: mod_base = OTHER; note = 2'-O-methyluridine-3'-phosphorothioate 5'-(E)-Vinylphosphonate
  modified_base 2: mod_base = OTHER; note = 2'-deoxycytidine-3'-phosphorothioate
  modified_base 3: mod_base = OTHER; note = 2'-O-methyluridine-3'-phosphate
  modified_base 4: mod_base = OTHER; note = 2'-O-methyladenosine-3'-phosphate
  modified_base 6: mod_base = OTHER; note = 2'-O-methylguanosine-3'-phosphate
  modified_base 7: mod_base = OTHER; note = Adenosine-glycol nucleic acid (GNA), S-isomer
  modified_base 8: mod_base = OTHER; note = 2'-O-methyluridine-3'-phosphate
  modified_base 9: mod_base = OTHER; note = 2'-O-methylcytidine-3'-phosphate
  modified_base 10: mod_base = OTHER; note = 2'-O-methylcytidine-3'-phosphate
  modified_base 11: mod_base = OTHER; note = 2'-O-methyladenosine-3'-phosphate
  modified_base 13: mod_base = OTHER; note = 2'-O-methylcytidine-3'-phosphate
  modified_base 14: mod_base = OTHER; note = 2'-deoxy-2'-fluorouridine-3'-phosphate
  modified_base 15: mod_base = OTHER; note = 2'-O-methyluridine-3'-phosphate
  modified_base 16: mod_base = OTHER; note = 2'-O-methylcytidine-3'-phosphate
  modified_base 17: mod_base = OTHER; note = 2'-O-methyluridine-3'-phosphate
  modified_base 18: mod_base = OTHER; note = 2'-O-methyluridine-3'-phosphate
  modified_base 19: mod_base = OTHER; note = 2'-O-methyladenosine-3'-phosphate
  modified_base 20: mod_base = OTHER; note = 2'-O-methyluridine-3'-phosphate
  modified_base 21: mod_base = OTHER; note = 2'-O-methyluridine-3'-phosphorothioate
  modified_base 22: mod_base = OTHER; note = 2'-O-methyladenosine-3'-phosphorothioate
  modified_base 23: mod_base = OTHER; note = 2'-O-methyladenosine
  misc_feature 1: note = RNA
  misc_feature 3..4: note = RNA
  misc_feature 6..11: note = RNA
  misc_feature 13..23: note = RNA
  misc_feature 2: note = DNA
  misc_feature 5: note = DNA
  misc_feature 12: note = DNA
tctaagatccagcttcttattaa

SEQ ID NO: 260 - DNA, 23 bp, synthetic construct
  source 1..23: mol_type = other DNA
  modified_base 1: mod_base = OTHER; note = 2'-O-methyluridine-3'-phosphorothioate 5'-(E)-Vinylphosphonate
  modified_base 2: mod_base = OTHER; note = 2'-deoxyguanosine-3'-phosphorothioate
  modified_base 3: mod_base = OTHER; note = 2'-O-methylcytidine-3'-phosphate
  modified_base 4: mod_base = OTHER; note = 2'-O-methyluridine-3'-phosphate
  modified_base 6: mod_base = OTHER; note = 2'-O-methyladenosine-3'-phosphate
  modified_base 8: mod_base = OTHER; note = 2'-O-methyladenosine-3'-phosphate
  modified_base 9: mod_base = OTHER; note = 2'-O-methyluridine-3'-phosphate
  modified_base 10: mod_base = OTHER; note = 2'-O-methylcytidine-3'-phosphate
  modified_base 11: mod_base = OTHER; note = 2'-O-methylcytidine-3'-phosphate
  modified_base 13: mod_base = OTHER; note = 2'-O-methylguanosine-3'-phosphate
  modified_base 14: mod_base = OTHER; note = 2'-deoxy-2'-fluorocytidine-3'-phosphate
  modified_base 15: mod_base = OTHER; note = 2'-O-methyluridine-3'-phosphate
  modified_base 16: mod_base = OTHER; note = 2'-O-methyluridine-3'-phosphate
  modified_base 17: mod_base = OTHER; note = 2'-O-methylcytidine-3'-phosphate
  modified_base 18: mod_base = OTHER; note = 2'-O-methyluridine-3'-phosphate
  modified_base 19: mod_base = OTHER; note = 2'-O-methyluridine-3'-phosphate
  modified_base 20: mod_base = OTHER; note = 2'-O-methyladenosine-3'-phosphate
  modified_base 21: mod_base = OTHER; note = 2'-O-methyluridine-3'-phosphorothioate
  modified_base 22: mod_base = OTHER; note = 2'-O-methyluridine-3'-phosphorothioate
  modified_base 23: mod_base = OTHER; note = 2'-O-methyladenosine
  misc_feature 1: note = RNA
  misc_feature 3..4: note = RNA
  misc_feature 6: note = RNA
  misc_feature 8..11: note = RNA
  misc_feature 13..23: note = RNA
  misc_feature 2: note = DNA
  misc_feature 5: note = DNA
  misc_feature 7: note = DNA
  misc_feature 12: note = DNA
tgctaagatccagcttcttatta

SEQ ID NO: 261 - DNA, 23 bp, synthetic construct
  source 1..23: mol_type = other DNA
  modified_base 1: mod_base = OTHER; note = 2'-O-methyluridine-3'-phosphorothioate 5'-(E)-Vinylphosphonate
  modified_base 2: mod_base = OTHER; note = 2'-deoxythymidine-3'-phosphorothioate
  modified_base 3: mod_base = OTHER; note = 2'-O-methylguanosine-3'-phosphate
  modified_base 4: mod_base = OTHER; note = 2'-O-methylcytidine-3'-phosphate
  modified_base 6: mod_base = OTHER; note = 2'-O-methyladenosine-3'-phosphate
  modified_base 7: mod_base = OTHER; note = Adenosine-glycol nucleic acid (GNA), S-isomer
  modified_base 8: mod_base = OTHER; note = 2'-O-methylguanosine-3'-phosphate
  modified_base 9: mod_base = OTHER; note = 2'-O-methyladenosine-3'-phosphate
  modified_base 10: mod_base = OTHER; note = 2'-O-methyluridine-3'-phosphate
  modified_base 11: mod_base = OTHER; note = 2'-O-methylcytidine-3'-phosphate
  modified_base 13: mod_base = OTHER; note = 2'-O-methyladenosine-3'-phosphate
  modified_base 14: mod_base = OTHER; note = 2'-deoxy-2'-fluoroguanosine-3'-phosphate
  modified_base 15: mod_base = OTHER; note = 2'-O-methylcytidine-3'-phosphate
  modified_base 16: mod_base = OTHER; note = 2'-O-methyluridine-3'-phosphate
  modified_base 17: mod_base = OTHER; note = 2'-O-methyluridine-3'-phosphate
  modified_base 18: mod_base = OTHER; note = 2'-O-methylcytidine-3'-phosphate
  modified_base 19: mod_base = OTHER; note = 2'-O-methyluridine-3'-phosphate
  modified_base 20: mod_base = OTHER; note = 2'-O-methyluridine-3'-phosphate
  modified_base 21: mod_base = OTHER; note = 2'-O-methyladenosine-3'-phosphorothioate
  modified_base 22: mod_base = OTHER; note = 2'-O-methyluridine-3'-phosphorothioate
  modified_base 23: mod_base = OTHER; note = 2'-O-methyluridine
  misc_feature 1: note = RNA
  misc_feature 3..4: note = RNA
  misc_feature 6..11: note = RNA
  misc_feature 13..23: note = RNA
  misc_feature 2: note = DNA
  misc_feature 5: note = DNA
  misc_feature 12: note = DNA
ttgctaagatccagcttcttatt

SEQ ID NO: 262 - DNA, 23 bp, synthetic construct
  source 1..23: mol_type = other DNA
  modified_base 1: mod_base = OTHER; note = 2'-O-methyluridine-3'-phosphorothioate 5'-(E)-Vinylphosphonate
  modified_base 2: mod_base = OTHER; note = 2'-deoxythymidine-3'-phosphorothioate
  modified_base 3: mod_base = OTHER; note = 2'-O-methyluridine-3'-phosphate
  modified_base 4: mod_base = OTHER; note = 2'-O-methylguanosine-3'-phosphate
  modified_base 6: mod_base = OTHER; note = 2'-O-methyluridine-3'-phosphate
  modified_base 7: mod_base = OTHER; note = Adenosine-glycol nucleic acid (GNA), S-isomer
  modified_base 8: mod_base = OTHER; note = 2'-O-methyladenosine-3'-phosphate
  modified_base 9: mod_base = OTHER; note = 2'-O-methylguanosine-3'-phosphate
  modified_base 10: mod_base = OTHER; note = 2'-O-methyladenosine-3'-phosphate
  modified_base 11: mod_base = OTHER; note = 2'-O-methyluridine-3'-phosphate
  modified_base 13: mod_base = OTHER; note = 2'-O-methylcytidine-3'-phosphate
  modified_base 14: mod_base = OTHER; note = 2'-deoxy-2'-fluoroadenosine-3'-phosphate
  modified_base 15: mod_base = OTHER; note = 2'-O-methylguanosine-3'-phosphate
  modified_base 16: mod_base = OTHER; note = 2'-O-methylcytidine-3'-phosphate
  modified_base 17: mod_base = OTHER; note = 2'-O-methyluridine-3'-phosphate
  modified_base 18: mod_base = OTHER; note = 2'-O-methyluridine-3'-phosphate
  modified_base 19: mod_base = OTHER; note = 2'-O-methylcytidine-3'-phosphate
  modified_base 20: mod_base = OTHER; note = 2'-O-methyluridine-3'-phosphate
  modified_base 21: mod_base = OTHER; note = 2'-O-methyluridine-3'-phosphorothioate
  modified_base 22: mod_base = OTHER; note = 2'-O-methyladenosine-3'-phosphorothioate
  modified_base 23: mod_base = OTHER; note = 2'-O-methyluridine
  misc_feature 1: note = RNA
  misc_feature 3..4: note = RNA
  misc_feature 6..11: note = RNA
  misc_feature 13..23: note = RNA
  misc_feature 2: note = DNA
  misc_feature 5: note = DNA
  misc_feature 12: note = DNA
tttgctaagatccagcttcttat

SEQ ID NO: 263 - DNA, 23 bp, synthetic construct
  source 1..23: mol_type = other DNA
  modified_base 1: mod_base = OTHER; note = 2'-O-methyluridine-3'-phosphorothioate 5'-(E)-Vinylphosphonate
  modified_base 2: mod_base = OTHER; note = 2'-deoxyguanosine-3'-phosphorothioate
  modified_base 3: mod_base = OTHER; note = 2'-O-methyluridine-3'-phosphate
  modified_base 4: mod_base = OTHER; note = 2'-O-methyluridine-3'-phosphate
  modified_base 6: mod_base = OTHER; note = 2'-O-methylcytidine-3'-phosphate
  modified_base 7: mod_base = OTHER; note = Thymidine-glycol nucleic acid (GNA), S-Isomer
  modified_base 8: mod_base = OTHER; note = 2'-O-methyladenosine-3'-phosphate
  modified_base 9: mod_base = OTHER; note = 2'-O-methyladenosine-3'-phosphate
  modified_base 10: mod_base = OTHER; note = 2'-O-methylguanosine-3'-phosphate
  modified_base 11: mod_base = OTHER; note = 2'-O-methyladenosine-3'-phosphate
  modified_base 13: mod_base = OTHER; note = 2'-O-methylcytidine-3'-phosphate
  modified_base 14: mod_base = OTHER; note = 2'-deoxy-2'-fluorocytidine-3'-phosphate
  modified_base 15: mod_base = OTHER; note = 2'-O-methyladenosine-3'-phosphate
  modified_base 16: mod_base = OTHER; note = 2'-O-methylguanosine-3'-phosphate
  modified_base 17: mod_base = OTHER; note = 2'-O-methylcytidine-3'-phosphate
  modified_base 18: mod_base = OTHER; note = 2'-O-methyluridine-3'-phosphate
  modified_base 19: mod_base = OTHER; note = 2'-O-methyluridine-3'-phosphate
  modified_base 20: mod_base = OTHER; note = 2'-O-methylcytidine-3'-phosphate
  modified_base 21: mod_base = OTHER; note = 2'-O-methyluridine-3'-phosphorothioate
  modified_base 22: mod_base = OTHER; note = 2'-O-methyluridine-3'-phosphorothioate
  modified_base 23: mod_base = OTHER; note = 2'-O-methyladenosine
  misc_feature 1: note = RNA
  misc_feature 3..4: note = RNA
  misc_feature 6..11: note = RNA
  misc_feature 13..23: note = RNA
  misc_feature 2: note = DNA
  misc_feature 5: note = DNA
  misc_feature 12: note = DNA
tgttgctaagatccagcttctta

SEQ ID NO: 264 - DNA, 23 bp, synthetic construct
  source 1..23: mol_type = other DNA
  modified_base 1: mod_base = OTHER; note = 2'-O-methyluridine-3'-phosphorothioate 5'-(E)-Vinylphosphonate
  modified_base 2: mod_base = OTHER; note = 2'-deoxycytidine-3'-phosphorothioate
  modified_base 3: mod_base = OTHER; note = 2'-O-methylguanosine-3'-phosphate
  modified_base 4: mod_base = OTHER; note = 2'-O-methyluridine-3'-phosphate
  modified_base 6: mod_base = OTHER; note = 2'-O-methylguanosine-3'-phosphate
  modified_base 7: mod_base = OTHER; note = cytidine-2'-phosphate
  modified_base 8: mod_base = OTHER; note = 2'-O-methyluridine-3'-phosphate
  modified_base 9: mod_base = OTHER; note = 2'-O-methyladenosine-3'-phosphate
  modified_base 10: mod_base = OTHER; note = 2'-O-methyladenosine-3'-phosphate
  modified_base 11: mod_base = OTHER; note = 2'-O-methylguanosine-3'-phosphate
  modified_base 13: mod_base = OTHER; note = 2'-O-methyluridine-3'-phosphate
  modified_base 14: mod_base = OTHER; note = 2'-deoxy-2'-fluorocytidine-3'-phosphate
  modified_base 15: mod_base = OTHER; note = 2'-O-methylcytidine-3'-phosphate
  modified_base 16: mod_base = OTHER; note = 2'-O-methyladenosine-3'-phosphate
  modified_base 17: mod_base = OTHER; note = 2'-O-methylguanosine-3'-phosphate
  modified_base 18: mod_base = OTHER; note = 2'-O-methylcytidine-3'-phosphate
  modified_base 19: mod_base = OTHER; note = 2'-O-methyluridine-3'-phosphate
  modified_base 20: mod_base = OTHER; note = 2'-O-methyluridine-3'-phosphate
  modified_base 21: mod_base = OTHER; note = 2'-O-methylcytidine-3'-phosphorothioate
  modified_base 22: mod_base = OTHER; note = 2'-O-methyluridine-3'-phosphorothioate
  modified_base 23: mod_base = OTHER; note = 2'-O-methyluridine
  misc_feature 1: note = RNA
  misc_feature 3..4: note = RNA
  misc_feature 6..11: note = RNA
  misc_feature 13..23: note = RNA
  misc_feature 2: note = DNA
  misc_feature 5: note = DNA
  misc_feature 12: note = DNA
tcgttgctaagatccagcttctt

SEQ ID NO: 265 - DNA, 23 bp, synthetic construct
  source 1..23: mol_type = other DNA
  modified_base 1: mod_base = OTHER; note = 2'-O-methyluridine-3'-phosphorothioate 5'-(E)-Vinylphosphonate
  modified_base 2: mod_base = OTHER; note = 2'-deoxyadenosine-3'-phosphorothioate
  modified_base 3: mod_base = OTHER; note = 2'-O-methylcytidine-3'-phosphate
  modified_base 4: mod_base = OTHER; note = 2'-O-methylguanosine-3'-phosphate
  modified_base 6: mod_base = OTHER; note = 2'-O-methyluridine-3'-phosphate
  modified_base 7: mod_base = OTHER; note = guanosine-2'-phosphate
  modified_base 8: mod_base = OTHER; note = 2'-O-methylcytidine-3'-phosphate
  modified_base 9: mod_base = OTHER; note = 2'-O-methyluridine-3'-phosphate
  modified_base 10: mod_base = OTHER; note = 2'-O-methyladenosine-3'-phosphate
  modified_base 11: mod_base = OTHER; note = 2'-O-methyladenosine-3'-phosphate
  modified_base 13: mod_base = OTHER; note = 2'-O-methyladenosine-3'-phosphate
  modified_base 14: mod_base = OTHER; note = 2'-deoxy-2'-fluorouridine-3'-phosphate
  modified_base 15: mod_base = OTHER; note = 2'-O-methylcytidine-3'-phosphate
  modified_base 16: mod_base = OTHER; note = 2'-O-methylcytidine-3'-phosphate
  modified_base 17: mod_base = OTHER; note = 2'-O-methyladenosine-3'-phosphate
  modified_base 18: mod_base = OTHER; note = 2'-O-methylguanosine-3'-phosphate
  modified_base 19: mod_base = OTHER; note = 2'-O-methylcytidine-3'-phosphate
  modified_base 20: mod_base = OTHER; note = 2'-O-methyluridine-3'-phosphate
  modified_base 21: mod_base = OTHER; note = 2'-O-methyluridine-3'-phosphorothioate
  modified_base 22: mod_base = OTHER; note = 2'-O-methylcytidine-3'-phosphorothioate
  modified_base 23: mod_base = OTHER; note = 2'-O-methyluridine
  misc_feature 1: note = RNA
  misc_feature 3..4: note = RNA
  misc_feature 6..11: note = RNA
  misc_feature 13..23: note = RNA
  misc_feature 2: note = DNA
  misc_feature 5: note = DNA
  misc_feature 12: note = DNA
tacgttgctaagatccagcttct

SEQ ID NO: 266 - DNA, 23 bp, synthetic construct
  source 1..23: mol_type = other DNA
  modified_base 1: mod_base = OTHER; note = 2'-O-methyluridine-3'-phosphorothioate 5'-(E)-Vinylphosphonate
  modified_base 2: mod_base = OTHER; note = 2'-deoxyguanosine-3'-phosphorothioate
  modified_base 3: mod_base = OTHER; note = 2'-O-methyladenosine-3'-phosphate
  modified_base 4: mod_base = OTHER; note = 2'-O-methylcytidine-3'-phosphate
  modified_base 6: mod_base = OTHER; note = 2'-O-methyluridine-3'-phosphate
  modified_base 8: mod_base = OTHER; note = 2'-O-methylguanosine-3'-phosphate
  modified_base 9: mod_base = OTHER; note = 2'-O-methylcytidine-3'-phosphate
  modified_base 10: mod_base = OTHER; note = 2'-O-methyluridine-3'-phosphate
  modified_base 11: mod_base = OTHER; note = 2'-O-methyladenosine-3'-phosphate
  modified_base 13: mod_base = OTHER; note = 2'-O-methylguanosine-3'-phosphate
  modified_base 14: mod_base = OTHER; note = 2'-deoxy-2'-fluoroadenosine-3'-phosphate
  modified_base 15: mod_base = OTHER; note = 2'-O-methyluridine-3'-phosphate
  modified_base 16: mod_base = OTHER; note = 2'-O-methylcytidine-3'-phosphate
  modified_base 17: mod_base = OTHER; note = 2'-O-methylcytidine-3'-phosphate
  modified_base 18: mod_base = OTHER; note = 2'-O-methyladenosine-3'-phosphate
  modified_base 19: mod_base = OTHER; note = 2'-O-methylguanosine-3'-phosphate
  modified_base 20: mod_base = OTHER; note = 2'-O-methylcytidine-3'-phosphate
  modified_base 21: mod_base = OTHER; note = 2'-O-methyluridine-3'-phosphorothioate
  modified_base 22: mod_base = OTHER; note = 2'-O-methyluridine-3'-phosphorothioate
  modified_base 23: mod_base = OTHER; note = 2'-O-methylcytidine
  misc_feature 1: note = RNA
  misc_feature 3..4: note = RNA
  misc_feature 6: note = RNA
  misc_feature 8..11: note = RNA
  misc_feature 13..23: note = RNA
  misc_feature 2: note = DNA
  misc_feature 5: note = DNA
  misc_feature 7: note = DNA
  misc_feature 12: note = DNA
tgacgttgctaagatccagcttc

SEQ ID NO: 267 - DNA, 23 bp, synthetic construct
  source 1..23: mol_type = other DNA
  modified_base 1: mod_base = OTHER; note = 2'-O-methyluridine-3'-phosphorothioate 5'-(E)-Vinylphosphonate
  modified_base 2: mod_base = OTHER; note = 2'-deoxyguanosine-3'-phosphorothioate
  modified_base 3: mod_base = OTHER; note = 2'-O-methylguanosine-3'-phosphate
  modified_base 4: mod_base = OTHER; note = 2'-O-methyladenosine-3'-phosphate
  modified_base 6: mod_base = OTHER; note = 2'-O-methylguanosine-3'-phosphate
  modified_base 8: mod_base = OTHER; note = 2'-O-methyluridine-3'-phosphate
  modified_base 9: mod_base = OTHER; note = 2'-O-methylguanosine-3'-phosphate
  modified_base 10: mod_base = OTHER; note = 2'-O-methylcytidine-3'-phosphate
  modified_base 11: mod_base = OTHER; note = 2'-O-methyluridine-3'-phosphate
  modified_base 13: mod_base = OTHER; note = 2'-O-methyladenosine-3'-phosphate
  modified_base 14: mod_base = OTHER; note = 2'-deoxy-2'-fluoroguanosine-3'-phosphate
  modified_base 15: mod_base = OTHER; note = 2'-O-methyladenosine-3'-phosphate
  modified_base 16: mod_base = OTHER; note = 2'-O-methyluridine-3'-phosphate
  modified_base 17: mod_base = OTHER; note = 2'-O-methylcytidine-3'-phosphate
  modified_base 18: mod_base = OTHER; note = 2'-O-methylcytidine-3'-phosphate
  modified_base 19: mod_base = OTHER; note = 2'-O-methyladenosine-3'-phosphate
  modified_base 20: mod_base = OTHER; note = 2'-O-methylguanosine-3'-phosphate
  modified_base 21: mod_base = OTHER; note = 2'-O-methylcytidine-3'-phosphorothioate
  modified_base 22: mod_base = OTHER; note = 2'-O-methyluridine-3'-phosphorothioate
  modified_base 23: mod_base = OTHER; note = 2'-O-methyluridine
  misc_feature 1: note = RNA
  misc_feature 3..4: note = RNA
  misc_feature 6: note = RNA
  misc_feature 8..11: note = RNA
  misc_feature 13..23: note = RNA
  misc_feature 2: note = DNA
  misc_feature 5: note = DNA
  misc_feature 7: note = DNA
  misc_feature 12: note = DNA
tggacgttgctaagatccagctt

SEQ ID NO: 268 - DNA, 23 bp, synthetic construct
  source 1..23: mol_type = other DNA
  modified_base 1: mod_base = OTHER; note = 2'-O-methyluridine-3'-phosphorothioate 5'-(E)-Vinylphosphonate
  modified_base 2: mod_base = OTHER; note = 2'-deoxythymidine-3'-phosphorothioate
  modified_base 3: mod_base = OTHER; note = 2'-O-methylguanosine-3'-phosphate
  modified_base 4: mod_base = OTHER; note = 2'-O-methylguanosine-3'-phosphate
  modified_base 6: mod_base = OTHER; note = 2'-O-methylcytidine-3'-phosphate
  modified_base 7: mod_base = OTHER; note = guanosine-2'-phosphate
  modified_base 8: mod_base = OTHER; note = 2'-O-methyluridine-3'-phosphate
  modified_base 9: mod_base = OTHER; note = 2'-O-methyluridine-3'-phosphate
  modified_base 10: mod_base = OTHER; note = 2'-O-methylguanosine-3'-phosphate
  modified_base 11: mod_base = OTHER; note = 2'-O-methylcytidine-3'-phosphate
  modified_base 13: mod_base = OTHER; note = 2'-O-methyladenosine-3'-phosphate
  modified_base 14: mod_base = OTHER; note = 2'-deoxy-2'-fluoroadenosine-3'-phosphate
  modified_base 15: mod_base = OTHER; note = 2'-O-methylguanosine-3'-phosphate
  modified_base 16: mod_base = OTHER; note = 2'-O-methyladenosine-3'-phosphate
  modified_base 17: mod_base = OTHER; note = 2'-O-methyluridine-3'-phosphate
  modified_base 18: mod_base = OTHER; note = 2'-O-methylcytidine-3'-phosphate
  modified_base 19: mod_base = OTHER; note = 2'-O-methylcytidine-3'-phosphate
  modified_base 20: mod_base = OTHER; note = 2'-O-methyladenosine-3'-phosphate
  modified_base 21: mod_base = OTHER; note = 2'-O-methylguanosine-3'-phosphorothioate
  modified_base 22: mod_base = OTHER; note = 2'-O-methylcytidine-3'-phosphorothioate
  modified_base 23: mod_base = OTHER; note = 2'-O-methyluridine
  misc_feature 1: note = RNA
  misc_feature 3..4: note = RNA
  misc_feature 6..11: note = RNA
  misc_feature 13..23: note = RNA
  misc_feature 2: note = DNA
  misc_feature 5: note = DNA
  misc_feature 12: note = DNA
ttggacgttgctaagatccagct

SEQ ID NO: 269 - DNA, 23 bp, synthetic construct
  source 1..23: mol_type = other DNA
  modified_base 1: mod_base = OTHER; note = 2'-O-methyluridine-3'-phosphorothioate 5'-(E)-Vinylphosphonate
  modified_base 2: mod_base = OTHER; note = 2'-deoxycytidine-3'-phosphorothioate
  modified_base 3: mod_base = OTHER; note = 2'-O-methyluridine-3'-phosphate
  modified_base 4: mod_base = OTHER; note = 2'-O-methylguanosine-3'-phosphate
  modified_base 6: mod_base = OTHER; note = 2'-O-methyladenosine-3'-phosphate
  modified_base 8: mod_base = OTHER; note = 2'-O-methylguanosine-3'-phosphate
  modified_base 9: mod_base = OTHER; note = 2'-O-methyluridine-3'-phosphate
  modified_base 10: mod_base = OTHER; note = 2'-O-methyluridine-3'-phosphate
  modified_base 11: mod_base = OTHER; note = 2'-O-methylguanosine-3'-phosphate
  modified_base 13: mod_base = OTHER; note = 2'-O-methyluridine-3'-phosphate
  modified_base 14: mod_base = OTHER; note = 2'-deoxy-2'-fluoroadenosine-3'-phosphate
  modified_base 15: mod_base = OTHER; note = 2'-O-methyladenosine-3'-phosphate
  modified_base 16: mod_base = OTHER; note = 2'-O-methylguanosine-3'-phosphate
  modified_base 17: mod_base = OTHER; note = 2'-O-methyladenosine-3'-phosphate
  modified_base 18: mod_base = OTHER; note = 2'-O-methyluridine-3'-phosphate
  modified_base 19: mod_base = OTHER; note = 2'-O-methylcytidine-3'-phosphate
  modified_base 20: mod_base = OTHER; note = 2'-O-methylcytidine-3'-phosphate
  modified_base 21: mod_base = OTHER; note = 2'-O-methyladenosine-3'-phosphorothioate
  modified_base 22: mod_base = OTHER; note = 2'-O-methylguanosine-3'-phosphorothioate
  modified_base 23: mod_base = OTHER; note = 2'-O-methylcytidine
  misc_feature 1: note = RNA
  misc_feature 3..4: note = RNA
  misc_feature 6: note = RNA
  misc_feature 8..11: note = RNA
  misc_feature 13..23: note = RNA
  misc_feature 2: note = DNA
  misc_feature 5: note = DNA
  misc_feature 7: note = DNA
  misc_feature 12: note = DNA
tctggacgttgctaagatccagc

SEQ ID NO: 270 - DNA, 23 bp, synthetic construct
  source 1..23: mol_type = other DNA
  modified_base 1: mod_base = OTHER; note = 2'-O-methyluridine-3'-phosphorothioate 5'-(E)-Vinylphosphonate
  modified_base 2: mod_base = OTHER; note = 2'-deoxyadenosine-3'-phosphorothioate
  modified_base 3: mod_base = OTHER; note = 2'-O-methylcytidine-3'-phosphate
  modified_base 4: mod_base = OTHER; note = 2'-O-methyluridine-3'-phosphate
  modified_base 6: mod_base = OTHER; note = 2'-O-methylguanosine-3'-phosphate
  modified_base 7: mod_base = OTHER; note = Adenosine-glycol nucleic acid (GNA), S-isomer
  modified_base 8: mod_base = OTHER; note = 2'-O-methylcytidine-3'-phosphate
  modified_base 9: mod_base = OTHER; note = 2'-O-methylguanosine-3'-phosphate
  modified_base 10: mod_base = OTHER; note = 2'-O-methyluridine-3'-phosphate
  modified_base 11: mod_base = OTHER; note = 2'-O-methyluridine-3'-phosphate
  modified_base 13: mod_base = OTHER; note = 2'-O-methylcytidine-3'-phosphate
  modified_base 14: mod_base = OTHER; note = 2'-deoxy-2'-fluorouridine-3'-phosphate
  modified_base 15: mod_base = OTHER; note = 2'-O-methyladenosine-3'-phosphate
  modified_base 16: mod_base = OTHER; note = 2'-O-methyladenosine-3'-phosphate
  modified_base 17: mod_base = OTHER; note = 2'-O-methylguanosine-3'-phosphate
  modified_base 18: mod_base = OTHER; note = 2'-O-methyladenosine-3'-phosphate
  modified_base 19: mod_base = OTHER; note = 2'-O-methyluridine-3'-phosphate
  modified_base 20: mod_base = OTHER; note = 2'-O-methylcytidine-3'-phosphate
  modified_base 21: mod_base = OTHER; note = 2'-O-methylcytidine-3'-phosphorothioate
  modified_base 22: mod_base = OTHER; note = 2'-O-methyladenosine-3'-phosphorothioate
  modified_base 23: mod_base = OTHER; note = 2'-O-methylguanosine
  misc_feature 1: note = RNA
  misc_feature 3..4: note = RNA
  misc_feature 6..11: note = RNA
  misc_feature 13..23: note = RNA
  misc_feature 2: note = DNA
  misc_feature 5: note = DNA
  misc_feature 12: note = DNA
tactggacgttgctaagatccag

SEQ ID NO: 271 - DNA, 23 bp, synthetic construct
  source 1..23: mol_type = other DNA
  modified_base 1: mod_base = OTHER; note = 2'-O-methyluridine-3'-phosphorothioate 5'-(E)-Vinylphosphonate
  modified_base 2: mod_base = OTHER; note = 2'-deoxyguanosine-3'-phosphorothioate
  modified_base 3: mod_base = OTHER; note = 2'-O-methyladenosine-3'-phosphate
  modified_base 4: mod_base = OTHER; note = 2'-O-methylcytidine-3'-phosphate
  modified_base 6: mod_base = OTHER; note = 2'-O-methylguanosine-3'-phosphate
  modified_base 7: mod_base = OTHER; note = guanosine-2'-phosphate
  modified_base 8: mod_base = OTHER; note = 2'-O-methyladenosine-3'-phosphate
  modified_base 9: mod_base = OTHER; note = 2'-O-methylcytidine-3'-phosphate
  modified_base 10: mod_base = OTHER; note = 2'-O-methylguanosine-3'-phosphate
  modified_base 11: mod_base = OTHER; note = 2'-O-methyluridine-3'-phosphate
  modified_base 13: mod_base = OTHER; note = 2'-O-methylguanosine-3'-phosphate
  modified_base 14: mod_base = OTHER; note = 2'-deoxy-2'-fluorocytidine-3'-phosphate
  modified_base 15: mod_base = OTHER; note = 2'-O-methyluridine-3'-phosphate
  modified_base 16: mod_base = OTHER; note = 2'-O-methyladenosine-3'-phosphate
  modified_base 17: mod_base = OTHER; note = 2'-O-methyladenosine-3'-phosphate
  modified_base 18: mod_base = OTHER; note = 2'-O-methylguanosine-3'-phosphate
  modified_base 19: mod_base = OTHER; note = 2'-O-methyladenosine-3'-phosphate
  modified_base 20: mod_base = OTHER; note = 2'-O-methyluridine-3'-phosphate
  modified_base 21: mod_base = OTHER; note = 2'-O-methylcytidine-3'-phosphorothioate
  modified_base 22: mod_base = OTHER; note = 2'-O-methylcytidine-3'-phosphorothioate
  modified_base 23: mod_base = OTHER; note = 2'-O-methyladenosine
  misc_feature 1: note = RNA
  misc_feature 3..4: note = RNA
  misc_feature 6..11: note = RNA
  misc_feature 13..23: note = RNA
  misc_feature 2: note = DNA
  misc_feature 5: note = DNA
  misc_feature 12: note = DNA
tgactggacgttgctaagatcca

SEQ ID NO: 272 - DNA, 23 bp, synthetic construct
  source 1..23: mol_type = other DNA
  modified_base 1: mod_base = OTHER; note = 2'-O-methyluridine-3'-phosphorothioate 5'-(E)-Vinylphosphonate
  modified_base 2: mod_base = OTHER; note = 2'-deoxyguanosine-3'-phosphorothioate
  modified_base 3: mod_base = OTHER; note = 2'-O-methylguanosine-3'-phosphate
  modified_base 4: mod_base = OTHER; note = 2'-O-methyladenosine-3'-phosphate
  modified_base 6: mod_base = OTHER; note = 2'-O-methyluridine-3'-phosphate
  modified_base 7: mod_base = OTHER; note = guanosine-2'-phosphate
  modified_base 8: mod_base = OTHER; note = 2'-O-methylguanosine-3'-phosphate
  modified_base 9: mod_base = OTHER; note = 2'-O-methyladenosine-3'-phosphate
  modified_base 10: mod_base = OTHER; note = 2'-O-methylcytidine-3'-phosphate
  modified_base 11: mod_base = OTHER; note = 2'-O-methylguanosine-3'-phosphate
  modified_base 13: mod_base = OTHER; note = 2'-O-methyluridine-3'-phosphate
  modified_base 14: mod_base = OTHER; note = 2'-deoxy-2'-fluoroguanosine-3'-phosphate
  modified_base 15: mod_base = OTHER; note = 2'-O-methylcytidine-3'-phosphate
  modified_base 16: mod_base = OTHER; note = 2'-O-methyluridine-3'-phosphate
  modified_base 17: mod_base = OTHER; note = 2'-O-methyladenosine-3'-phosphate
  modified_base 18: mod_base = OTHER; note = 2'-O-methyladenosine-3'-phosphate
  modified_base 19: mod_base = OTHER; note = 2'-O-methylguanosine-3'-phosphate
  modified_base 20: mod_base = OTHER; note = 2'-O-methyladenosine-3'-phosphate
  modified_base 21: mod_base = OTHER; note = 2'-O-methyluridine-3'-phosphorothioate
  modified_base 22: mod_base = OTHER; note = 2'-O-methylcytidine-3'-phosphorothioate
  modified_base 23: mod_base = OTHER; note = 2'-O-methylcytidine
  misc_feature 1: note = RNA
  misc_feature 3..4: note = RNA
  misc_feature 6..11: note = RNA
  misc_feature 13..23: note = RNA
  misc_feature 2: note = DNA
  misc_feature 5: note = DNA
  misc_feature 12: note = DNA
tggactggacgttgctaagatcc

SEQ ID NO: 273 - DNA, 23 bp, synthetic construct
  source 1..23: mol_type = other DNA
  modified_base 1: mod_base = OTHER; note = 2'-O-methyluridine-3'-phosphorothioate 5'-(E)-Vinylphosphonate
  modified_base 2: mod_base = OTHER; note = 2'-deoxythymidine-3'-phosphorothioate
  modified_base 3: mod_base = OTHER; note = 2'-O-methylguanosine-3'-phosphate
  modified_base 4: mod_base = OTHER; note = 2'-O-methylguanosine-3'-phosphate
  modified_base 6: mod_base = OTHER; note = 2'-O-methylcytidine-3'-phosphate
  modified_base 7: mod_base = OTHER; note = Thymidine-glycol nucleic acid (GNA), S-Isomer
  modified_base 8: mod_base = OTHER; note = 2'-O-methylguanosine-3'-phosphate
  modified_base 9: mod_base = OTHER; note = 2'-O-methylguanosine-3'-phosphate
  modified_base 10: mod_base = OTHER; note = 2'-O-methyladenosine-3'-phosphate
  modified_base 11: mod_base = OTHER; note = 2'-O-methylcytidine-3'-phosphate
  modified_base 13: mod_base = OTHER; note = 2'-O-methyluridine-3'-phosphate
  modified_base 14: mod_base = OTHER; note = 2'-deoxy-2'-fluorouridine-3'-phosphate
  modified_base 15: mod_base = OTHER; note = 2'-O-methylguanosine-3'-phosphate
  modified_base 16: mod_base = OTHER; note = 2'-O-methylcytidine-3'-phosphate
  modified_base 17: mod_base = OTHER; note = 2'-O-methyluridine-3'-phosphate
  modified_base 18: mod_base = OTHER; note = 2'-O-methyladenosine-3'-phosphate
  modified_base 19: mod_base = OTHER; note = 2'-O-methyladenosine-3'-phosphate
  modified_base 20: mod_base = OTHER; note = 2'-O-methylguanosine-3'-phosphate
  modified_base 21: mod_base = OTHER; note = 2'-O-methyladenosine-3'-phosphorothioate
  modified_base 22: mod_base = OTHER; note = 2'-O-methyluridine-3'-phosphorothioate
  modified_base 23: mod_base = OTHER; note = 2'-O-methylcytidine
  misc_feature 1: note = RNA
  misc_feature 3..4: note = RNA
  misc_feature 6..11: note = RNA
  misc_feature 13..23: note = RNA
  misc_feature 2: note = DNA
  misc_feature 5: note = DNA
  misc_feature 12: note = DNA
ttggactggacgttgctaagatc

SEQ ID NO: 274 - DNA, 23 bp, synthetic construct
  source 1..23: mol_type = other DNA
  modified_base 1: mod_base = OTHER; note = 2'-O-methyluridine-3'-phosphorothioate 5'-(E)-Vinylphosphonate
  modified_base 2: mod_base = OTHER; note = 2'-deoxythymidine-3'-phosphorothioate
  modified_base 3: mod_base = OTHER; note = 2'-O-methyluridine-3'-phosphate
  modified_base 4: mod_base = OTHER; note = 2'-O-methylguanosine-3'-phosphate
  modified_base 6: mod_base = OTHER; note = 2'-O-methyladenosine-3'-phosphate
  modified_base 7: mod_base = OTHER; note = cytidine-2'-phosphate
  modified_base 8: mod_base = OTHER; note = 2'-O-methyluridine-3'-phosphate
  modified_base 9: mod_base = OTHER; note = 2'-O-methylguanosine-3'-phosphate
  modified_base 10: mod_base = OTHER; note = 2'-O-methylguanosine-3'-phosphate
  modified_base 11: mod_base = OTHER; note = 2'-O-methyladenosine-3'-phosphate
  modified_base 13: mod_base = OTHER; note = 2'-O-methylguanosine-3'-phosphate
  modified_base 14: mod_base = OTHER; note = 2'-deoxy-2'-fluorouridine-3'-phosphate
  modified_base 15: mod_base = OTHER; note = 2'-O-methyluridine-3'-phosphate
  modified_base 16: mod_base = OTHER; note = 2'-O-methylguanosine-3'-phosphate
  modified_base 17: mod_base = OTHER; note = 2'-O-methylcytidine-3'-phosphate
  modified_base 18: mod_base = OTHER; note = 2'-O-methyluridine-3'-phosphate
  modified_base 19: mod_base = OTHER; note = 2'-O-methyladenosine-3'-phosphate
  modified_base 20: mod_base = OTHER; note = 2'-O-methyladenosine-3'-phosphate
  modified_base 21: mod_base = OTHER; note = 2'-O-methylguanosine-3'-phosphorothioate
  modified_base 22: mod_base = OTHER; note = 2'-O-methyladenosine-3'-phosphorothioate
  modified_base 23: mod_base = OTHER; note = 2'-O-methyluridine
  misc_feature 1: note = RNA
  misc_feature 3..4: note = RNA
  misc_feature 6..11: note = RNA
  misc_feature 13..23: note = RNA
  misc_feature 2: note = DNA
  misc_feature 5: note = DNA
  misc_feature 12: note = DNA
tttggactggacgttgctaagat

SEQ ID NO: 275 - DNA, 23 bp, synthetic construct
  source 1..23: mol_type = other DNA
  modified_base 1: mod_base = OTHER; note = 2'-O-methyluridine-3'-phosphorothioate 5'-(E)-Vinylphosphonate
  modified_base 2: mod_base = OTHER; note = 2'-deoxycytidine-3'-phosphorothioate
  modified_base 3: mod_base = OTHER; note = 2'-O-methyluridine-3'-phosphate
  modified_base 4: mod_base = OTHER; note = 2'-O-methyluridine-3'-phosphate
  modified_base 6: mod_base = OTHER; note = 2'-O-methylguanosine-3'-phosphate
  modified_base 7: mod_base = OTHER; note = Adenosine-glycol nucleic acid (GNA), S-isomer
  modified_base 8: mod_base = OTHER; note = 2'-O-methylcytidine-3'-phosphate
  modified_base 9: mod_base = OTHER; note = 2'-O-methyluridine-3'-phosphate
  modified_base 10: mod_base = OTHER; note = 2'-O-methylguanosine-3'-phosphate
  modified_base 11: mod_base = OTHER; note = 2'-O-methylguanosine-3'-phosphate
  modified_base 13: mod_base = OTHER; note = 2'-O-methylcytidine-3'-phosphate
  modified_base 14: mod_base = OTHER; note = 2'-deoxy-2'-fluoroguanosine-3'-phosphate
  modified_base 15: mod_base = OTHER; note = 2'-O-methyluridine-3'-phosphate
  modified_base 16: mod_base = OTHER; note = 2'-O-methyluridine-3'-phosphate
  modified_base 17: mod_base = OTHER; note = 2'-O-methylguanosine-3'-phosphate
  modified_base 18: mod_base = OTHER; note = 2'-O-methylcytidine-3'-phosphate
  modified_base 19: mod_base = OTHER; note = 2'-O-methyluridine-3'-phosphate
  modified_base 20: mod_base = OTHER; note = 2'-O-methyladenosine-3'-phosphate
  modified_base 21: mod_base = OTHER; note = 2'-O-methyladenosine-3'-phosphorothioate
  modified_base 22: mod_base = OTHER; note = 2'-O-methylguanosine-3'-phosphorothioate
  modified_base 23: mod_base = OTHER; note = 2'-O-methyladenosine
  misc_feature 1: note = RNA
  misc_feature 3..4: note = RNA
  misc_feature 6..11: note = RNA
  misc_feature 13..23: note = RNA
  misc_feature 2: note = DNA
  misc_feature 5: note = DNA
  misc_feature 12: note = DNA
tcttggactggacgttgctaaga

SEQ ID NO: 276 - DNA, 23 bp, synthetic construct
  source 1..23: mol_type = other DNA
  modified_base 1: mod_base = OTHER; note = 2'-O-methyluridine-3'-phosphorothioate 5'-(E)-Vinylphosphonate
  modified_base 2: mod_base = OTHER; note = 2'-deoxyadenosine-3'-phosphorothioate
  modified_base 3: mod_base = OTHER; note = 2'-O-methylcytidine-3'-phosphate
  modified_base 4: mod_base = OTHER; note = 2'-O-methyluridine-3'-phosphate
  modified_base 6: mod_base = OTHER; note = 2'-O-methylguanosine-3'-phosphate
  modified_base 7: mod_base = OTHER; note = guanosine-2'-phosphate
  modified_base 8: mod_base = OTHER; note = 2'-O-methyladenosine-3'-phosphate
  modified_base 9: mod_base = OTHER; note = 2'-O-methylcytidine-3'-phosphate
  modified_base 10: mod_base = OTHER; note = 2'-O-methyluridine-3'-phosphate
  modified_base 11: mod_base = OTHER; note = 2'-O-methylguanosine-3'-phosphate
  modified_base 13: mod_base = OTHER; note = 2'-O-methyladenosine-3'-phosphate
  modified_base 14: mod_base = OTHER; note = 2'-deoxy-2'-fluorocytidine-3'-phosphate
  modified_base 15: mod_base = OTHER; note = 2'-O-methylguanosine-3'-phosphate
  modified_base 16: mod_base = OTHER; note = 2'-O-methyluridine-3'-phosphate
  modified_base 17: mod_base = OTHER; note = 2'-O-methyluridine-3'-phosphate
  modified_base 18: mod_base = OTHER; note = 2'-O-methylguanosine-3'-phosphate
  modified_base 19: mod_base = OTHER; note = 2'-O-methylcytidine-3'-phosphate
  modified_base 20: mod_base = OTHER; note = 2'-O-methyluridine-3'-phosphate
  modified_base 21: mod_base = OTHER; note = 2'-O-methyladenosine-3'-phosphorothioate
  modified_base 22: mod_base = OTHER; note = 2'-O-methyladenosine-3'-phosphorothioate
  modified_base 23: mod_base = OTHER; note = 2'-O-methylguanosine
  misc_feature 1: note = RNA
  misc_feature 3..4: note = RNA
  misc_feature 6..11: note = RNA
  misc_feature 13..23: note = RNA
  misc_feature 2: note = DNA
  misc_feature 5: note = DNA
  misc_feature 12: note = DNA
tacttggactggacgttgctaag

SEQ ID NO: 277 - DNA, 23 bp, synthetic construct
  source 1..23: mol_type = other DNA
  modified_base 1: mod_base = OTHER; note = 2'-O-methyluridine-3'-phosphorothioate 5'-(E)-Vinylphosphonate
  modified_base 2: mod_base = OTHER; note = 2'-deoxycytidine-3'-phosphorothioate
  modified_base 3: mod_base = OTHER; note = 2'-O-methyladenosine-3'-phosphate
  modified_base 4: mod_base = OTHER; note = 2'-O-methylcytidine-3'-phosphate
  modified_base 6: mod_base = OTHER; note = 2'-O-methyluridine-3'-phosphate
  modified_base 7: mod_base = OTHER; note = guanosine-2'-phosphate
  modified_base 8: mod_base = OTHER; note = 2'-O-methylguanosine-3'-phosphate
  modified_base 9: mod_base = OTHER; note = 2'-O-methyladenosine-3'-phosphate
  modified_base 10: mod_base = OTHER; note = 2'-O-methylcytidine-3'-phosphate
  modified_base 11: mod_base = OTHER; note = 2'-O-methyluridine-3'-phosphate
  modified_base 13: mod_base = OTHER; note = 2'-O-methylguanosine-3'-phosphate
  modified_base 14: mod_base = OTHER; note = 2'-deoxy-2'-fluoroadenosine-3'-phosphate
  modified_base 15: mod_base = OTHER; note = 2'-O-methylcytidine-3'-phosphate
  modified_base 16: mod_base = OTHER; note = 2'-O-methylguanosine-3'-phosphate
  modified_base 17: mod_base = OTHER; note = 2'-O-methyluridine-3'-phosphate
  modified_base 18: mod_base = OTHER; note = 2'-O-methyluridine-3'-phosphate
  modified_base 19: mod_base = OTHER; note = 2'-O-methylguanosine-3'-phosphate
  modified_base 20: mod_base = OTHER; note = 2'-O-methylcytidine-3'-phosphate
  modified_base 21: mod_base = OTHER; note = 2'-O-methyluridine-3'-phosphorothioate
  modified_base 22: mod_base = OTHER; note = 2'-O-methyladenosine-3'-phosphorothioate
  modified_base 23: mod_base = OTHER; note = 2'-O-methyladenosine
  misc_feature 1: note = RNA
  misc_feature 3..4: note = RNA
  misc_feature 6..11: note = RNA
  misc_feature 13..23: note = RNA
  misc_feature 2: note = DNA
  misc_feature 5: note = DNA
  misc_feature 12: note = DNA
tcacttggactggacgttgctaa

SEQ ID NO: 278 - DNA, 23 bp, synthetic construct
  source 1..23: mol_type = other DNA
  modified_base 1: mod_base = OTHER; note = 2'-O-methyluridine-3'-phosphorothioate 5'-(E)-Vinylphosphonate
  modified_base 2: mod_base = OTHER; note = 2'-deoxyadenosine-3'-phosphorothioate
  modified_base 3: mod_base = OTHER; note = 2'-O-methylcytidine-3'-phosphate
  modified_base 4: mod_base = OTHER; note = 2'-O-methyladenosine-3'-phosphate
  modified_base 6: mod_base = OTHER; note = 2'-O-methyluridine-3'-phosphate
  modified_base 8: mod_base = OTHER; note = 2'-O-methylguanosine-3'-phosphate
  modified_base 9: mod_base = OTHER; note = 2'-O-methylguanosine-3'-phosphate
  modified_base 10: mod_base = OTHER; note = 2'-O-methyladenosine-3'-phosphate
  modified_base 11: mod_base = OTHER; note = 2'-O-methylcytidine-3'-phosphate
  modified_base 13: mod_base = OTHER; note = 2'-O-methylguanosine-3'-phosphate
  modified_base 14: mod_base = OTHER; note = 2'-deoxy-2'-fluoroguanosine-3'-phosphate
  modified_base 15: mod_base = OTHER; note = 2'-O-methyladenosine-3'-phosphate
  modified_base 16: mod_base = OTHER; note = 2'-O-methylcytidine-3'-phosphate
  modified_base 17: mod_base = OTHER; note = 2'-O-methylguanosine-3'-phosphate
  modified_base 18: mod_base = OTHER; note = 2'-O-methyluridine-3'-phosphate
  modified_base 19: mod_base = OTHER; note = 2'-O-methyluridine-3'-phosphate
  modified_base 20: mod_base = OTHER; note = 2'-O-methylguanosine-3'-phosphate
  modified_base 21: mod_base = OTHER; note = 2'-O-methylcytidine-3'-phosphorothioate
  modified_base 22: mod_base = OTHER; note = 2'-O-methyluridine-3'-phosphorothioate
  modified_base 23: mod_base = OTHER; note = 2'-O-methyladenosine
  misc_feature 1: note = RNA
  misc_feature 3..4: note = RNA
  misc_feature 6: note = RNA
  misc_feature 8..11: note = RNA
  misc_feature 13..23: note = RNA
  misc_feature 2: note = DNA
  misc_feature 5: note = DNA
  misc_feature 7: note = DNA
  misc_feature 12: note = DNA
tacacttggactggacgttgcta

SEQ ID NO: 279 - DNA, 23 bp, synthetic construct
  source 1..23: mol_type = other DNA
  modified_base 1: mod_base = OTHER; note = 2'-O-methyluridine-3'-phosphorothioate 5'-(E)-Vinylphosphonate
  modified_base 2: mod_base = OTHER; note = 2'-deoxycytidine-3'-phosphorothioate
  modified_base 3: mod_base = OTHER; note = 2'-O-methyladenosine-3'-phosphate
  modified_base 4: mod_base = OTHER; note = 2'-O-methylcytidine-3'-phosphate
  modified_base 6: mod_base = OTHER; note = 2'-O-methylcytidine-3'-phosphate
  modified_base 8: mod_base = OTHER; note = 2'-O-methyluridine-3'-phosphate
  modified_base 9: mod_base = OTHER; note = 2'-O-methylguanosine-3'-phosphate
  modified_base 10: mod_base = OTHER; note = 2'-O-methylguanosine-3'-phosphate
  modified_base 11: mod_base = OTHER; note = 2'-O-methyladenosine-3'-phosphate
  modified_base 13: mod_base = OTHER; note = 2'-O-methyluridine-3'-phosphate
  modified_base 14: mod_base = OTHER; note = 2'-deoxy-2'-fluoroguanosine-3'-phosphate
  modified_base 15: mod_base = OTHER; note = 2'-O-methylguanosine-3'-phosphate
  modified_base 16: mod_base = OTHER; note = 2'-O-methyladenosine-3'-phosphate
  modified_base 17: mod_base = OTHER; note = 2'-O-methylcytidine-3'-phosphate
  modified_base 18: mod_base = OTHER; note = 2'-O-methylguanosine-3'-phosphate
  modified_base 19: mod_base = OTHER; note = 2'-O-methyluridine-3'-phosphate
  modified_base 20: mod_base = OTHER; note = 2'-O-methyluridine-3'-phosphate
  modified_base 21: mod_base = OTHER; note = 2'-O-methylguanosine-3'-phosphorothioate
  modified_base 22: mod_base = OTHER; note = 2'-O-methylcytidine-3'-phosphorothioate
  modified_base 23: mod_base = OTHER; note = 2'-O-methyluridine
  misc_feature 1: note = RNA
  misc_feature 3..4: note = RNA
  misc_feature 6: note = RNA
  misc_feature 8..11: note = RNA
  misc_feature 13..23: note = RNA
  misc_feature 2: note = DNA
  misc_feature 5: note = DNA
  misc_feature 7: note = DNA
  misc_feature 12: note = DNA
tcacacttggactggacgttgct

SEQ ID NO: 280 - DNA, 23 bp, synthetic construct
  source 1..23: mol_type = other DNA
  modified_base 1: mod_base = OTHER; note = 2'-O-methyluridine-3'-phosphorothioate 5'-(E)-Vinylphosphonate
  modified_base 2: mod_base = OTHER; note = 2'-deoxycytidine-3'-phosphorothioate
  modified_base 3: mod_base = OTHER; note = 2'-O-methylcytidine-3'-phosphate
  modified_base 4: mod_base = OTHER; note = 2'-O-methyladenosine-3'-phosphate
  modified_base 6: mod_base = OTHER; note = 2'-O-methyladenosine-3'-phosphate
  modified_base 8: mod_base = OTHER; note = 2'-O-methyluridine-3'-phosphate
  modified_base 9: mod_base = OTHER; note = 2'-O-methyluridine-3'-phosphate
  modified_base 10: mod_base = OTHER; note = 2'-O-methylguanosine-3'-phosphate
  modified_base 11: mod_base = OTHER; note = 2'-O-methylguanosine-3'-phosphate
  modified_base 13: mod_base = OTHER; note = 2'-O-methylcytidine-3'-phosphate
  modified_base 14: mod_base = OTHER; note = 2'-deoxy-2'-fluorouridine-3'-phosphate
  modified_base 15: mod_base = OTHER; note = 2'-O-methylguanosine-3'-phosphate
  modified_base 16: mod_base = OTHER; note = 2'-O-methylguanosine-3'-phosphate
  modified_base 17: mod_base = OTHER; note = 2'-O-methyladenosine-3'-phosphate
  modified_base 18: mod_base = OTHER; note = 2'-O-methylcytidine-3'-phosphate
  modified_base 19: mod_base = OTHER; note = 2'-O-methylguanosine-3'-phosphate
  modified_base 20: mod_base = OTHER; note = 2'-O-methyluridine-3'-phosphate
  modified_base 21: mod_base = OTHER; note = 2'-O-methyluridine-3'-phosphorothioate
  modified_base 22: mod_base = OTHER; note = 2'-O-methylguanosine-3'-phosphorothioate
  modified_base 23: mod_base = OTHER; note = 2'-O-methylcytidine
  misc_feature 1: note = RNA
  misc_feature 3..4: note = RNA
  misc_feature 6: note = RNA
  misc_feature 8..11: note = RNA
  misc_feature 13..23: note = RNA
  misc_feature 2: note = DNA
  misc_feature 5: note = DNA
  misc_feature 7: note = DNA
  misc_feature 12: note = DNA
tccacacttggactggacgttgc

SEQ ID NO: 281 - DNA, 23 bp, synthetic construct
  source 1..23: mol_type = other DNA
  modified_base 1: mod_base = OTHER; note = 2'-O-methyluridine-3'-phosphorothioate 5'-(E)-Vinylphosphonate
  modified_base 2: mod_base = OTHER; note = 2'-deoxyguanosine-3'-phosphorothioate
  modified_base 3: mod_base = OTHER; note = 2'-O-methylcytidine-3'-phosphate
  modified_base 4: mod_base = OTHER; note = 2'-O-methylcytidine-3'-phosphate
  modified_base 6: mod_base = OTHER; note = 2'-O-methylcytidine-3'-phosphate
  modified_base 7: mod_base = OTHER; note = Adenosine-glycol nucleic acid (GNA), S-isomer
  modified_base 8: mod_base = OTHER; note = 2'-O-methylcytidine-3'-phosphate
  modified_base 9: mod_base = OTHER; note = 2'-O-methyluridine-3'-phosphate
  modified_base 10: mod_base = OTHER; note = 2'-O-methyluridine-3'-phosphate
  modified_base 11: mod_base = OTHER; note = 2'-O-methylguanosine-3'-phosphate
  modified_base 13: mod_base = OTHER; note = 2'-O-methyladenosine-3'-phosphate
  modified_base 14: mod_base = OTHER; note = 2'-deoxy-2'-fluorocytidine-3'-phosphate
  modified_base 15: mod_base = OTHER; note = 2'-O-methyluridine-3'-phosphate
  modified_base 16: mod_base = OTHER; note = 2'-O-methylguanosine-3'-phosphate
  modified_base 17: mod_base = OTHER; note = 2'-O-methylguanosine-3'-phosphate
  modified_base 18: mod_base = OTHER; note = 2'-O-methyladenosine-3'-phosphate
  modified_base 19: mod_base = OTHER; note = 2'-O-methylcytidine-3'-phosphate
  modified_base 20: mod_base = OTHER; note = 2'-O-methylguanosine-3'-phosphate
  modified_base 21: mod_base = OTHER; note = 2'-O-methyluridine-3'-phosphorothioate
  modified_base 22: mod_base = OTHER; note = 2'-O-methyluridine-3'-phosphorothioate
  modified_base 23: mod_base = OTHER; note = 2'-O-methylguanosine
  misc_feature 1: note = RNA
  misc_feature 3..4: note = RNA
  misc_feature 6..11: note = RNA
  misc_feature 13..23: note = RNA
  misc_feature 2: note = DNA
  misc_feature 5: note = DNA
  misc_feature 12: note = DNA
tgccacacttggactggacgttg

SEQ ID NO: 282 - DNA, 23 bp, synthetic construct
  source 1..23: mol_type = other DNA
  modified_base 1: mod_base = OTHER; note = 2'-O-methyluridine-3'-phosphorothioate 5'-(E)-Vinylphosphonate
  modified_base 2: mod_base = OTHER; note = 2'-deoxyadenosine-3'-phosphorothioate
  modified_base 3: mod_base = OTHER; note = 2'-O-methylguanosine-3'-phosphate
  modified_base 4: mod_base = OTHER; note = 2'-O-methylcytidine-3'-phosphate
  modified_base 6: mod_base = OTHER; note = 2'-O-methyladenosine-3'-phosphate
  modified_base 7: mod_base = OTHER; note = cytidine-2'-phosphate
  modified_base 8: mod_base = OTHER; note = 2'-O-methyladenosine-3'-phosphate
  modified_base 9: mod_base = OTHER; note = 2'-O-methylcytidine-3'-phosphate
  modified_base 10: mod_base = OTHER; note = 2'-O-methyluridine-3'-phosphate
  modified_base 11: mod_base = OTHER; note = 2'-O-methyluridine-3'-phosphate
  modified_base 13: mod_base = OTHER; note = 2'-O-methylguanosine-3'-phosphate
  modified_base 14: mod_base = OTHER; note = 2'-deoxy-2'-fluoroadenosine-3'-phosphate
  modified_base 15: mod_base = OTHER; note = 2'-O-methylcytidine-3'-phosphate
  modified_base 16: mod_base = OTHER; note = 2'-O-methyluridine-3'-phosphate
  modified_base 17: mod_base = OTHER; note = 2'-O-methylguanosine-3'-phosphate
  modified_base 18: mod_base = OTHER; note = 2'-O-methylguanosine-3'-phosphate
  modified_base 19: mod_base = OTHER; note = 2'-O-methyladenosine-3'-phosphate
  modified_base 20: mod_base = OTHER; note = 2'-O-methylcytidine-3'-phosphate
  modified_base 21: mod_base = OTHER; note = 2'-O-methylguanosine-3'-phosphorothioate
  modified_base 22: mod_base = OTHER; note = 2'-O-methyluridine-3'-phosphorothioate
  modified_base 23: mod_base = OTHER; note = 2'-O-methyluridine
  misc_feature 1: note = RNA
  misc_feature 3..4: note = RNA
  misc_feature 6..11: note = RNA
  misc_feature 13..23: note = RNA
  misc_feature 2: note = DNA
  misc_feature 5: note = DNA
  misc_feature 12: note = DNA
tagccacacttggactggacgtt

SEQ ID NO: 283 - DNA, 23 bp, synthetic construct
  source 1..23: mol_type = other DNA
  modified_base 1: mod_base = OTHER; note = 2'-O-methyluridine-3'-phosphorothioate 5'-(E)-Vinylphosphonate
  modified_base 2: mod_base = OTHER; note = 2'-deoxyguanosine-3'-phosphorothioate
  modified_base 3: mod_base = OTHER; note = 2'-O-methyladenosine-3'-phosphate
  modified_base 4: mod_base = OTHER; note = 2'-O-methylguanosine-3'-phosphate
  modified_base 6: mod_base = OTHER; note = 2'-O-methylcytidine-3'-phosphate
  modified_base 7: mod_base = OTHER; note = Adenosine-glycol nucleic acid (GNA), S-isomer
  modified_base 8: mod_base = OTHER; note = 2'-O-methylcytidine-3'-phosphate
  modified_base 9: mod_base = OTHER; note = 2'-O-methyladenosine-3'-phosphate
  modified_base 10: mod_base = OTHER; note = 2'-O-methylcytidine-3'-phosphate
  modified_base 11: mod_base = OTHER; note = 2'-O-methyluridine-3'-phosphate
  modified_base 13: mod_base = OTHER; note = 2'-O-methylguanosine-3'-phosphate
  modified_base 14: mod_base = OTHER; note = 2'-deoxy-2'-fluoroguanosine-3'-phosphate
  modified_base 15: mod_base = OTHER; note = 2'-O-methyladenosine-3'-phosphate
  modified_base 16: mod_base = OTHER; note = 2'-O-methylcytidine-3'-phosphate
  modified_base 17: mod_base = OTHER; note = 2'-O-methyluridine-3'-phosphate
  modified_base 18: mod_base = OTHER; note = 2'-O-methylguanosine-3'-phosphate
  modified_base 19: mod_base = OTHER; note = 2'-O-methylguanosine-3'-phosphate
  modified_base 20: mod_base = OTHER; note = 2'-O-methyladenosine-3'-phosphate
  modified_base 21: mod_base = OTHER; note = 2'-O-methylcytidine-3'-phosphorothioate
  modified_base 22: mod_base = OTHER; note = 2'-O-methylguanosine-3'-phosphorothioate
  modified_base 23: mod_base = OTHER; note = 2'-O-methyluridine
  misc_feature 1: note = RNA
  misc_feature 3..4: note = RNA
  misc_feature 6..11: note = RNA
  misc_feature 13..23: note = RNA
  misc_feature 2: note = DNA
  misc_feature 5: note = DNA
  misc_feature 12: note = DNA
tgagccacacttggactggacgt

SEQ ID NO: 284 - DNA, 23 bp, synthetic construct
  source 1..23: mol_type = other DNA
  modified_base 1: mod_base = OTHER; note = 2'-O-methyluridine-3'-phosphorothioate 5'-(E)-Vinylphosphonate
  modified_base 2: mod_base = OTHER; note = 2'-deoxythymidine-3'-phosphorothioate
  modified_base 3: mod_base = OTHER; note = 2'-O-methylguanosine-3'-phosphate
  modified_base 4: mod_base = OTHER; note = 2'-O-methyladenosine-3'-phosphate
  modified_base 6: mod_base = OTHER; note = 2'-O-methylcytidine-3'-phosphate
  modified_base 7: mod_base = OTHER; note = cytidine-2'-phosphate
  modified_base 8: mod_base = OTHER; note = 2'-O-methyladenosine-3'-phosphate
  modified_base 9: mod_base = OTHER; note = 2'-O-methylcytidine-3'-phosphate
  modified_base 10: mod_base = OTHER; note = 2'-O-methyladenosine-3'-phosphate
  modified_base 11: mod_base = OTHER; note = 2'-O-methylcytidine-3'-phosphate
  modified_base 13: mod_base = OTHER; note = 2'-O-methyluridine-3'-phosphate
  modified_base 14: mod_base = OTHER; note = 2'-deoxy-2'-fluoroguanosine-3'-phosphate
  modified_base 15: mod_base = OTHER; note = 2'-O-methylguanosine-3'-phosphate
  modified_base 16: mod_base = OTHER; note = 2'-O-methyladenosine-3'-phosphate
  modified_base 17: mod_base = OTHER; note = 2'-O-methylcytidine-3'-phosphate
  modified_base 18: mod_base = OTHER; note = 2'-O-methyluridine-3'-phosphate
  modified_base 19: mod_base = OTHER; note = 2'-O-methylguanosine-3'-phosphate
  modified_base 20: mod_base = OTHER; note = 2'-O-methylguanosine-3'-phosphate
  modified_base 21: mod_base = OTHER; note = 2'-O-methyladenosine-3'-phosphorothioate
  modified_base 22: mod_base = OTHER; note = 2'-O-methylcytidine-3'-phosphorothioate
  modified_base 23: mod_base = OTHER; note = 2'-O-methylguanosine
  misc_feature 1: note = RNA
  misc_feature 3..4: note = RNA
  misc_feature 6..11: note = RNA
  misc_feature 13..23: note = RNA
  misc_feature 2: note = DNA
  misc_feature 5: note = DNA
  misc_feature 12: note = DNA
ttgagccacacttggactggacg

SEQ ID NO: 285 - DNA, 23 bp, synthetic construct
  source 1..23: mol_type = other DNA
  modified_base 1: mod_base = OTHER; note = 2'-O-methyluridine-3'-phosphorothioate 5'-(E)-Vinylphosphonate
  modified_base 2: mod_base = OTHER; note = 2'-deoxythymidine-3'-phosphorothioate
  modified_base 3: mod_base = OTHER; note = 2'-O-methyluridine-3'-phosphate
  modified_base 4: mod_base = OTHER; note = 2'-O-methylguanosine-3'-phosphate
  modified_base 6: mod_base = OTHER; note = 2'-O-methylguanosine-3'-phosphate
  modified_base 7: mod_base = OTHER; note = cytidine-2'-phosphate
  modified_base 8: mod_base = OTHER; note = 2'-O-methylcytidine-3'-phosphate
  modified_base 9: mod_base = OTHER; note = 2'-O-methyladenosine-3'-phosphate
  modified_base 10: mod_base = OTHER; note = 2'-O-methylcytidine-3'-phosphate
  modified_base 11: mod_base = OTHER; note = 2'-O-methyladenosine-3'-phosphate
  modified_base 13: mod_base = OTHER; note = 2'-O-methyluridine-3'-phosphate
  modified_base 14: mod_base = OTHER; note = 2'-deoxy-2'-fluorouridine-3'-phosphate
  modified_base 15: mod_base = OTHER; note = 2'-O-methylguanosine-3'-phosphate
  modified_base 16: mod_base = OTHER; note = 2'-O-methylguanosine-3'-phosphate
  modified_base 17: mod_base = OTHER; note = 2'-O-methyladenosine-3'-phosphate
  modified_base 18: mod_base = OTHER; note = 2'-O-methylcytidine-3'-phosphate
  modified_base 19: mod_base = OTHER; note = 2'-O-methyluridine-3'-phosphate
  modified_base 20: mod_base = OTHER; note = 2'-O-methylguanosine-3'-phosphate
  modified_base 21: mod_base = OTHER; note = 2'-O-methylguanosine-3'-phosphorothioate
  modified_base 22: mod_base = OTHER; note = 2'-O-methyladenosine-3'-phosphorothioate
  modified_base 23: mod_base = OTHER; note = 2'-O-methylcytidine
  misc_feature 1: note = RNA
  misc_feature 3..4: note = RNA
  misc_feature 6..11: note = RNA
  misc_feature 13..23: note = RNA
  misc_feature 2: note = DNA
  misc_feature 5: note = DNA
  misc_feature 12: note = DNA
tttgagccacacttggactggac

SEQ ID NO: 286 - DNA, 23 bp, synthetic construct
  source 1..23: mol_type = other DNA
  modified_base 1: mod_base = OTHER; note = 2'-O-methyluridine-3'-phosphorothioate 5'-(E)-Vinylphosphonate
  modified_base 2: mod_base = OTHER; note = 2'-deoxythymidine-3'-phosphorothioate
  modified_base 3: mod_base = OTHER; note = 2'-O-methyluridine-3'-phosphate
  modified_base 4: mod_base = OTHER; note = 2'-O-methyluridine-3'-phosphate
  modified_base 6: mod_base = OTHER; note = 2'-O-methyladenosine-3'-phosphate
  modified_base 7: mod_base = OTHER; note = guanosine-2'-phosphate
  modified_base 8: mod_base = OTHER; note = 2'-O-methylcytidine-3'-phosphate
  modified_base 9: mod_base = OTHER; note = 2'-O-methylcytidine-3'-phosphate
  modified_base 10: mod_base = OTHER; note = 2'-O-methyladenosine-3'-phosphate
  modified_base 11: mod_base = OTHER; note = 2'-O-methylcytidine-3'-phosphate
  modified_base 13: mod_base = OTHER; note = 2'-O-methylcytidine-3'-phosphate
  modified_base 14: mod_base = OTHER; note = 2'-deoxy-2'-fluorouridine-3'-phosphate
  modified_base 15: mod_base = OTHER; note = 2'-O-methyluridine-3'-phosphate
  modified_base 16: mod_base = OTHER; note = 2'-O-methylguanosine-3'-phosphate
  modified_base 17: mod_base = OTHER; note = 2'-O-methylguanosine-3'-phosphate
  modified_base 18: mod_base = OTHER; note = 2'-O-methyladenosine-3'-phosphate
  modified_base 19: mod_base = OTHER; note = 2'-O-methylcytidine-3'-phosphate
  modified_base 20: mod_base = OTHER; note = 2'-O-methyluridine-3'-phosphate
  modified_base 21: mod_base = OTHER; note = 2'-O-methylguanosine-3'-phosphorothioate
  modified_base 22: mod_base = OTHER; note = 2'-O-methylguanosine-3'-phosphorothioate
  modified_base 23: mod_base = OTHER; note = 2'-O-methyladenosine
  misc_feature 1: note = RNA
  misc_feature 3..4: note = RNA
  misc_feature 6..11: note = RNA
  misc_feature 13..23: note = RNA
  misc_feature 2: note = DNA
  misc_feature 5: note = DNA
  misc_feature 12: note = DNA
ttttgagccacacttggactgga

SEQ ID NO: 287 - DNA, 23 bp, synthetic construct
  source 1..23: mol_type = other DNA
  modified_base 1: mod_base = OTHER; note = 2'-O-methyluridine-3'-phosphorothioate 5'-(E)-Vinylphosphonate
  modified_base 2: mod_base = OTHER; note = 2'-deoxycytidine-3'-phosphorothioate
  modified_base 3: mod_base = OTHER; note = 2'-O-methyluridine-3'-phosphate
  modified_base 4: mod_base = OTHER; note = 2'-O-methyluridine-3'-phosphate
  modified_base 6: mod_base = OTHER; note = 2'-O-methylguanosine-3'-phosphate
  modified_base 7: mod_base = OTHER; note = Adenosine-glycol nucleic acid (GNA), S-isomer
  modified_base 8: mod_base = OTHER; note = 2'-O-methylguanosine-3'-phosphate
  modified_base 9: mod_base = OTHER; note = 2'-O-methylcytidine-3'-phosphate
  modified_base 10: mod_base = OTHER; note = 2'-O-methylcytidine-3'-phosphate
  modified_base 11: mod_base = OTHER; note = 2'-O-methyladenosine-3'-phosphate
  modified_base 13: mod_base = OTHER; note = 2'-O-methyladenosine-3'-phosphate
  modified_base 14: mod_base = OTHER; note = 2'-deoxy-2'-fluorocytidine-3'-phosphate
  modified_base 15: mod_base = OTHER; note = 2'-O-methyluridine-3'-phosphate
  modified_base 16: mod_base = OTHER; note = 2'-O-methyluridine-3'-phosphate
  modified_base 17: mod_base = OTHER; note = 2'-O-methylguanosine-3'-phosphate
  modified_base 18: mod_base = OTHER; note = 2'-O-methylguanosine-3'-phosphate
  modified_base 19: mod_base = OTHER; note = 2'-O-methyladenosine-3'-phosphate
  modified_base 20: mod_base = OTHER; note = 2'-O-methylcytidine-3'-phosphate
  modified_base 21: mod_base = OTHER; note = 2'-O-methyluridine-3'-phosphorothioate
  modified_base 22: mod_base = OTHER; note = 2'-O-methylguanosine-3'-phosphorothioate
  modified_base 23: mod_base = OTHER; note = 2'-O-methylguanosine
  misc_feature 1: note = RNA
  misc_feature 3..4: note = RNA
  misc_feature 6..11: note = RNA
  misc_feature 13..23: note = RNA
  misc_feature 2: note = DNA
  misc_feature 5: note = DNA
  misc_feature 12: note = DNA
tctttgagccacacttggactgg

SEQ ID NO: 288 - DNA, 23 bp, synthetic construct
  source 1..23: mol_type = other DNA
  modified_base 1: mod_base = OTHER; note = 2'-O-methyluridine-3'-phosphorothioate 5'-(E)-Vinylphosphonate
  modified_base 2: mod_base = OTHER; note = 2'-deoxycytidine-3'-phosphorothioate
  modified_base 3: mod_base = OTHER; note = 2'-O-methylcytidine-3'-phosphate
  modified_base 4: mod_base = OTHER; note = 2'-O-methyluridine-3'-phosphate
  modified_base 6: mod_base = OTHER; note = 2'-O-methyluridine-3'-phosphate
  modified_base 8: mod_base = OTHER; note = 2'-O-methyladenosine-3'-phosphate
  modified_base 9: mod_base = OTHER; note = 2'-O-methylguanosine-3'-phosphate
  modified_base 10: mod_base = OTHER; note = 2'-O-methylcytidine-3'-phosphate
  modified_base 11: mod_base = OTHER; note = 2'-O-methylcytidine-3'-phosphate
  modified_base 13: mod_base = OTHER; note = 2'-O-methylcytidine-3'-phosphate
  modified_base 14: mod_base = OTHER; note = 2'-deoxy-2'-fluoroadenosine-3'-phosphate
  modified_base 15: mod_base = OTHER; note = 2'-O-methylcytidine-3'-phosphate
  modified_base 16: mod_base = OTHER; note = 2'-O-methyluridine-3'-phosphate
  modified_base 17: mod_base = OTHER; note = 2'-O-methyluridine-3'-phosphate
  modified_base 18: mod_base = OTHER; note = 2'-O-methylguanosine-3'-phosphate
  modified_base 19: mod_base = OTHER; note = 2'-O-methylguanosine-3'-phosphate
  modified_base 20: mod_base = OTHER; note = 2'-O-methyladenosine-3'-phosphate
  modified_base 21: mod_base = OTHER; note = 2'-O-methylcytidine-3'-phosphorothioate
  modified_base 22: mod_base = OTHER; note = 2'-O-methyluridine-3'-phosphorothioate
  modified_base 23: mod_base = OTHER; note = 2'-O-methylguanosine
  misc_feature 1: note = RNA
  misc_feature 3..4: note = RNA
  misc_feature 6: note = RNA
  misc_feature 8..11: note = RNA
  misc_feature 13..23: note = RNA
  misc_feature 2: note = DNA
  misc_feature 5: note = DNA
  misc_feature 7: note = DNA
  misc_feature 12: note = DNA
tcctttgagccacacttggactg

SEQ ID NO: 289 - DNA, 23 bp, synthetic construct
  source 1..23: mol_type = other DNA
  modified_base 1: mod_base = OTHER; note = 2'-O-methyluridine-3'-phosphorothioate 5'-(E)-Vinylphosphonate
  modified_base 2: mod_base = OTHER; note = 2'-deoxythymidine-3'-phosphorothioate
  modified_base 3: mod_base = OTHER; note = 2'-O-methylcytidine-3'-phosphate
  modified_base 4: mod_base = OTHER; note = 2'-O-methylcytidine-3'-phosphate
  modified_base 6: mod_base = OTHER; note = 2'-O-methyluridine-3'-phosphate
  modified_base 8: mod_base = OTHER; note = 2'-O-methylguanosine-3'-phosphate
  modified_base 9: mod_base = OTHER; note = 2'-O-methyladenosine-3'-phosphate
  modified_base 10: mod_base = OTHER; note = 2'-O-methylguanosine-3'-phosphate
  modified_base 11: mod_base = OTHER; note = 2'-O-methylcytidine-3'-phosphate
  modified_base 13: mod_base = OTHER; note = 2'-O-methyladenosine-3'-phosphate
  modified_base 14: mod_base = OTHER; note = 2'-deoxy-2'-fluorocytidine-3'-phosphate
  modified_base 15: mod_base = OTHER; note = 2'-O-methyladenosine-3'-phosphate
  modified_base 16: mod_base = OTHER; note = 2'-O-methylcytidine-3'-phosphate
  modified_base 17: mod_base = OTHER; note = 2'-O-methyluridine-3'-phosphate
  modified_base 18: mod_base = OTHER; note = 2'-O-methyluridine-3'-phosphate
  modified_base 19: mod_base = OTHER; note = 2'-O-methylguanosine-3'-phosphate
  modified_base 20: mod_base = OTHER; note = 2'-O-methylguanosine-3'-phosphate
  modified_base 21: mod_base = OTHER; note = 2'-O-methyladenosine-3'-phosphorothioate
  modified_base 22: mod_base = OTHER; note = 2'-O-methylcytidine-3'-phosphorothioate
  modified_base 23: mod_base = OTHER; note = 2'-O-methyluridine
  misc_feature 1: note = RNA
  misc_feature 3..4: note = RNA
  misc_feature 6: note = RNA
  misc_feature 8..11: note = RNA
  misc_feature 13..23: note = RNA
  misc_feature 2: note = DNA
  misc_feature 5: note = DNA
  misc_feature 7: note = DNA
  misc_feature 12: note = DNA
ttcctttgagccacacttggact

SEQ ID NO: 290 - DNA, 23 bp, synthetic construct
  source 1..23: mol_type = other DNA
  modified_base 1: mod_base = OTHER; note = 2'-O-methyluridine-3'-phosphorothioate 5'-(E)-Vinylphosphonate
  modified_base 2: mod_base = OTHER; note = 2'-deoxyadenosine-3'-phosphorothioate
  modified_base 3: mod_base = OTHER; note = 2'-O-methyluridine-3'-phosphate
  modified_base 4: mod_base = OTHER; note = 2'-O-methylcytidine-3'-phosphate
  modified_base 6: mod_base = OTHER; note = 2'-O-methyluridine-3'-phosphate
  modified_base 8: mod_base = OTHER; note = 2'-O-methyluridine-3'-phosphate
  modified_base 9: mod_base = OTHER; note = 2'-O-methylguanosine-3'-phosphate
  modified_base 10: mod_base = OTHER; note = 2'-O-methyladenosine-3'-phosphate
  modified_base 11: mod_base = OTHER; note = 2'-O-methylguanosine-3'-phosphate
  modified_base 13: mod_base = OTHER; note = 2'-O-methylcytidine-3'-phosphate
  modified_base 14: mod_base = OTHER; note = 2'-deoxy-2'-fluoroadenosine-3'-phosphate
  modified_base 15: mod_base = OTHER; note = 2'-O-methylcytidine-3'-phosphate
  modified_base 16: mod_base = OTHER; note = 2'-O-methyladenosine-3'-phosphate
  modified_base 17: mod_base = OTHER; note = 2'-O-methylcytidine-3'-phosphate
  modified_base 18: mod_base = OTHER; note = 2'-O-methyluridine-3'-phosphate
  modified_base 19: mod_base = OTHER; note = 2'-O-methyluridine-3'-phosphate
  modified_base 20: mod_base = OTHER; note = 2'-O-methylguanosine-3'-phosphate
  modified_base 21: mod_base = OTHER; note = 2'-O-methylguanosine-3'-phosphorothioate
  modified_base 22: mod_base = OTHER; note = 2'-O-methyladenosine-3'-phosphorothioate
  modified_base 23: mod_base = OTHER; note = 2'-O-methylcytidine
  misc_feature 1: note = RNA
  misc_feature 3..4: note = RNA
  misc_feature 6: note = RNA
  misc_feature 8..11: note = RNA
  misc_feature 13..23: note = RNA
  misc_feature 2: note = DNA
  misc_feature 5: note = DNA
  misc_feature 7: note = DNA
  misc_feature 12: note = DNA
tatcctttgagccacacttggac

SEQ ID NO: 291 - DNA, 23 bp, synthetic construct
  source 1..23: mol_type = other DNA
  modified_base 1: mod_base = OTHER; note = 2'-O-methyluridine-3'-phosphorothioate 5'-(E)-Vinylphosphonate
  modified_base 2: mod_base = OTHER; note = 2'-deoxythymidine-3'-phosphorothioate
  modified_base 3: mod_base = OTHER; note = 2'-O-methyladenosine-3'-phosphate
  modified_base 4: mod_base = OTHER; note = 2'-O-methyluridine-3'-phosphate
  modified_base 6: mod_base = OTHER; note = 2'-O-methylcytidine-3'-phosphate
  modified_base 7: mod_base = OTHER; note = Thymidine-glycol nucleic acid (GNA), S-Isomer
  modified_base 8: mod_base = OTHER; note = 2'-O-methyluridine-3'-phosphate
  modified_base 9: mod_base = OTHER; note = 2'-O-methyluridine-3'-phosphate
  modified_base 10: mod_base = OTHER; note = 2'-O-methylguanosine-3'-phosphate
  modified_base 11: mod_base = OTHER; note = 2'-O-methyladenosine-3'-phosphate
  modified_base 13: mod_base = OTHER; note = 2'-O-methylcytidine-3'-phosphate
  modified_base 14: mod_base = OTHER; note = 2'-deoxy-2'-fluorocytidine-3'-phosphate
  modified_base 15: mod_base = OTHER; note = 2'-O-methyladenosine-3'-phosphate
  modified_base 16: mod_base = OTHER; note = 2'-O-methylcytidine-3'-phosphate
  modified_base 17: mod_base = OTHER; note = 2'-O-methyladenosine-3'-phosphate
  modified_base 18: mod_base = OTHER; note = 2'-O-methylcytidine-3'-phosphate
  modified_base 19: mod_base = OTHER; note = 2'-O-methyluridine-3'-phosphate
  modified_base 20: mod_base = OTHER; note = 2'-O-methyluridine-3'-phosphate
  modified_base 21: mod_base = OTHER; note = 2'-O-methylguanosine-3'-phosphorothioate
  modified_base 22: mod_base = OTHER; note = 2'-O-methylguanosine-3'-phosphorothioate
  modified_base 23: mod_base = OTHER; note = 2'-O-methyladenosine
  misc_feature 1: note = RNA
  misc_feature 3..4: note = RNA
  misc_feature 6..11: note = RNA
  misc_feature 13..23: note = RNA
  misc_feature 2: note = DNA
  misc_feature 5: note = DNA
  misc_feature 12: note = DNA
ttatcctttgagccacacttgga

SEQ ID NO: 292 - DNA, 23 bp, synthetic construct
  source 1..23: mol_type = other DNA
  modified_base 1: mod_base = OTHER; note = 2'-O-methyluridine-3'-phosphorothioate 5'-(E)-Vinylphosphonate
  modified_base 2: mod_base = OTHER; note = 2'-deoxythymidine-3'-phosphorothioate
  modified_base 3: mod_base = OTHER; note = 2'-O-methyluridine-3'-phosphate
  modified_base 4: mod_base = OTHER; note = 2'-O-methyladenosine-3'-phosphate
  modified_base 6: mod_base = OTHER; note = 2'-O-methylcytidine-3'-phosphate
  modified_base 7: mod_base = OTHER; note = cytidine-2'-phosphate
  modified_base 8: mod_base = OTHER; note = 2'-O-methyluridine-3'-phosphate
  modified_base 9: mod_base = OTHER; note = 2'-O-methyluridine-3'-phosphate
  modified_base 10: mod_base = OTHER; note = 2'-O-methyluridine-3'-phosphate
  modified_base 11: mod_base = OTHER; note = 2'-O-methylguanosine-3'-phosphate
  modified_base 13: mod_base = OTHER; note = 2'-O-methylguanosine-3'-phosphate
  modified_base 14: mod_base = OTHER; note = 2'-deoxy-2'-fluorocytidine-3'-phosphate
  modified_base 15: mod_base = OTHER; note = 2'-O-methylcytidine-3'-phosphate
  modified_base 16: mod_base = OTHER; note = 2'-O-methyladenosine-3'-phosphate
  modified_base 17: mod_base = OTHER; note = 2'-O-methylcytidine-3'-phosphate
  modified_base 18: mod_base = OTHER; note = 2'-O-methyladenosine-3'-phosphate
  modified_base 19: mod_base = OTHER; note = 2'-O-methylcytidine-3'-phosphate
  modified_base 20: mod_base = OTHER; note = 2'-O-methyluridine-3'-phosphate
  modified_base 21: mod_base = OTHER; note = 2'-O-methyluridine-3'-phosphorothioate
  modified_base 22: mod_base = OTHER; note = 2'-O-methylguanosine-3'-phosphorothioate
  modified_base 23: mod_base = OTHER; note = 2'-O-methylguanosine
  misc_feature 1: note = RNA
  misc_feature 3..4: note = RNA
  misc_feature 6..11: note = RNA
  misc_feature 13..23: note = RNA
  misc_feature 2: note = DNA
  misc_feature 5: note = DNA
  misc_feature 12: note = DNA
tttatcctttgagccacacttgg

SEQ ID NO: 293 - DNA, 23 bp, synthetic construct
  source 1..23: mol_type = other DNA
  modified_base 1: mod_base = OTHER; note = 2'-O-methyluridine-3'-phosphorothioate 5'-(E)-Vinylphosphonate
  modified_base 2: mod_base = OTHER; note = 2'-deoxyadenosine-3'-phosphorothioate
  modified_base 3: mod_base = OTHER; note = 2'-O-methyluridine-3'-phosphate
  modified_base 4: mod_base = OTHER; note = 2'-O-methyluridine-3'-phosphate
  modified_base 6: mod_base = OTHER; note = 2'-O-methyluridine-3'-phosphate
  modified_base 7: mod_base = OTHER; note = cytidine-2'-phosphate
  modified_base 8: mod_base = OTHER; note = 2'-O-methylcytidine-3'-phosphate
  modified_base 9: mod_base = OTHER; note = 2'-O-methyluridine-3'-phosphate
  modified_base 10: mod_base = OTHER; note = 2'-O-methyluridine-3'-phosphate
  modified_base 11: mod_base = OTHER; note = 2'-O-methyluridine-3'-phosphate
  modified_base 13: mod_base = OTHER; note = 2'-O-methyladenosine-3'-phosphate
  modified_base 14: mod_base = OTHER; note = 2'-deoxy-2'-fluoroguanosine-3'-phosphate
  modified_base 15: mod_base = OTHER; note = 2'-O-methylcytidine-3'-phosphate
  modified_base 16: mod_base = OTHER; note = 2'-O-methylcytidine-3'-phosphate
  modified_base 17: mod_base = OTHER; note = 2'-O-methyladenosine-3'-phosphate
  modified_base 18: mod_base = OTHER; note = 2'-O-methylcytidine-3'-phosphate
  modified_base 19: mod_base = OTHER; note = 2'-O-methyladenosine-3'-phosphate
  modified_base 20: mod_base = OTHER; note = 2'-O-methylcytidine-3'-phosphate
  modified_base 21: mod_base = OTHER; note = 2'-O-methyluridine-3'-phosphorothioate
  modified_base 22: mod_base = OTHER; note = 2'-O-methyluridine-3'-phosphorothioate
  modified_base 23: mod_base = OTHER; note = 2'-O-methylguanosine
  misc_feature 1: note = RNA
  misc_feature 3..4: note = RNA
  misc_feature 6..11: note = RNA
  misc_feature 13..23: note = RNA
  misc_feature 2: note = DNA
  misc_feature 5: note = DNA
  misc_feature 12: note = DNA
tattatcctttgagccacacttg

SEQ ID NO: 294 - DNA, 23 bp, synthetic construct
  source 1..23: mol_type = other DNA
  modified_base 1: mod_base = OTHER; note = 2'-O-methyluridine-3'-phosphorothioate 5'-(E)-Vinylphosphonate
  modified_base 2: mod_base = OTHER; note = 2'-deoxythymidine-3'-phosphorothioate
  modified_base 3: mod_base = OTHER; note = 2'-O-methyladenosine-3'-phosphate
  modified_base 4: mod_base = OTHER; note = 2'-O-methyluridine-3'-phosphate
  modified_base 6: mod_base = OTHER; note = 2'-O-methyladenosine-3'-phosphate
  modified_base 7: mod_base = OTHER; note = Thymidine-glycol nucleic acid (GNA), S-Isomer
  modified_base 8: mod_base = OTHER; note = 2'-O-methylcytidine-3'-phosphate
  modified_base 9: mod_base = OTHER; note = 2'-O-methylcytidine-3'-phosphate
  modified_base 10: mod_base = OTHER; note = 2'-O-methyluridine-3'-phosphate
  modified_base 11: mod_base = OTHER; note = 2'-O-methyluridine-3'-phosphate
  modified_base 13: mod_base = OTHER; note = 2'-O-methylguanosine-3'-phosphate
  modified_base 14: mod_base = OTHER; note = 2'-deoxy-2'-fluoroadenosine-3'-phosphate
  modified_base 15: mod_base = OTHER; note = 2'-O-methylguanosine-3'-phosphate
  modified_base 16: mod_base = OTHER; note = 2'-O-methylcytidine-3'-phosphate
  modified_base 17: mod_base = OTHER; note = 2'-O-methylcytidine-3'-phosphate
  modified_base 18: mod_base = OTHER; note = 2'-O-methyladenosine-3'-phosphate
  modified_base 19: mod_base = OTHER; note = 2'-O-methylcytidine-3'-phosphate
  modified_base 20: mod_base = OTHER; note = 2'-O-methyladenosine-3'-phosphate
  modified_base 21: mod_base = OTHER; note = 2'-O-methylcytidine-3'-phosphorothioate
  modified_base 22: mod_base = OTHER; note = 2'-O-methyluridine-3'-phosphorothioate
  modified_base 23: mod_base = OTHER; note = 2'-O-methyluridine
  misc_feature 1: note = RNA
  misc_feature 3..4: note = RNA
  misc_feature 6..11: note = RNA
  misc_feature 13..23: note = RNA
  misc_feature 2: note = DNA
  misc_feature 5: note = DNA
  misc_feature 12: note = DNA
ttattatcctttgagccacactt

SEQ ID NO: 295 - DNA, 23 bp, synthetic construct
  source 1..23: mol_type = other DNA
  modified_base 1: mod_base = OTHER; note = 2'-O-methyluridine-3'-phosphorothioate 5'-(E)-Vinylphosphonate
  modified_base 2: mod_base = OTHER; note = 2'-deoxyadenosine-3'-phosphorothioate
  modified_base 3: mod_base = OTHER; note = 2'-O-methyluridine-3'-phosphate
  modified_base 4: mod_base = OTHER; note = 2'-O-methyladenosine-3'-phosphate
  modified_base 6: mod_base = OTHER; note = 2'-O-methyluridine-3'-phosphate
  modified_base 7: mod_base = OTHER; note = Adenosine-glycol nucleic acid (GNA), S-isomer
  modified_base 8: mod_base = OTHER; note = 2'-O-methyluridine-3'-phosphate
  modified_base 9: mod_base = OTHER; note = 2'-O-methylcytidine-3'-phosphate
  modified_base 10: mod_base = OTHER; note = 2'-O-methylcytidine-3'-phosphate
  modified_base 11: mod_base = OTHER; note = 2'-O-methyluridine-3'-phosphate
  modified_base 13: mod_base = OTHER; note = 2'-O-methyluridine-3'-phosphate
  modified_base 14: mod_base = OTHER; note = 2'-deoxy-2'-fluoroguanosine-3'-phosphate
  modified_base 15: mod_base = OTHER; note = 2'-O-methyladenosine-3'-phosphate
  modified_base 16: mod_base = OTHER; note = 2'-O-methylguanosine-3'-phosphate
  modified_base 17: mod_base = OTHER; note = 2'-O-methylcytidine-3'-phosphate
  modified_base 18: mod_base = OTHER; note = 2'-O-methylcytidine-3'-phosphate
  modified_base 19: mod_base = OTHER; note = 2'-O-methyladenosine-3'-phosphate
  modified_base 20: mod_base = OTHER; note = 2'-O-methylcytidine-3'-phosphate
  modified_base 21: mod_base = OTHER; note = 2'-O-methyladenosine-3'-phosphorothioate
  modified_base 22: mod_base = OTHER; note = 2'-O-methylcytidine-3'-phosphorothioate
  modified_base 23: mod_base = OTHER; note = 2'-O-methyluridine
  misc_feature 1: note = RNA
  misc_feature 3..4: note = RNA
  misc_feature 6..11: note = RNA
  misc_feature 13..23: note = RNA
  misc_feature 2: note = DNA
  misc_feature 5: note = DNA
  misc_feature 12: note = DNA
tatattatcctttgagccacact

SEQ ID NO: 296 - DNA, 23 bp, synthetic construct
  source 1..23: mol_type = other DNA
  modified_base 1: mod_base = OTHER; note = 2'-O-methyluridine-3'-phosphorothioate 5'-(E)-Vinylphosphonate
  modified_base 2: mod_base = OTHER; note = 2'-deoxyguanosine-3'-phosphorothioate
  modified_base 3: mod_base = OTHER; note = 2'-O-methyladenosine-3'-phosphate
  modified_base 4: mod_base = OTHER; note = 2'-O-methyluridine-3'-phosphate
  modified_base 6: mod_base = OTHER; note = 2'-O-methyluridine-3'-phosphate
  modified_base 8: mod_base = OTHER; note = 2'-O-methyladenosine-3'-phosphate
  modified_base 9: mod_base = OTHER; note = 2'-O-methyluridine-3'-phosphate
  modified_base 10: mod_base = OTHER; note = 2'-O-methylcytidine-3'-phosphate
  modified_base 11: mod_base = OTHER; note = 2'-O-methylcytidine-3'-phosphate
  modified_base 13: mod_base = OTHER; note = 2'-O-methyluridine-3'-phosphate
  modified_base 14: mod_base = OTHER; note = 2'-deoxy-2'-fluorouridine-3'-phosphate
  modified_base 15: mod_base = OTHER; note = 2'-O-methylguanosine-3'-phosphate
  modified_base 16: mod_base = OTHER; note = 2'-O-methyladenosine-3'-phosphate
  modified_base 17: mod_base = OTHER; note = 2'-O-methylguanosine-3'-phosphate
  modified_base 18: mod_base = OTHER; note = 2'-O-methylcytidine-3'-phosphate
  modified_base 19: mod_base = OTHER; note = 2'-O-methylcytidine-3'-phosphate
  modified_base 20: mod_base = OTHER; note = 2'-O-methyladenosine-3'-phosphate
  modified_base 21: mod_base = OTHER; note = 2'-O-methylcytidine-3'-phosphorothioate
  modified_base 22: mod_base = OTHER; note = 2'-O-methyladenosine-3'-phosphorothioate
  modified_base 23: mod_base = OTHER; note = 2'-O-methylcytidine
  misc_feature 1: note = RNA
  misc_feature 3..4: note = RNA
  misc_feature 6: note = RNA
  misc_feature 8..11: note = RNA
  misc_feature 13..23: note = RNA
  misc_feature 2: note = DNA
  misc_feature 5: note = DNA
  misc_feature 7: note = DNA
  misc_feature 12: note = DNA
tgatattatcctttgagccacac

SEQ ID NO: 297 - DNA, 23 bp, synthetic construct
  source 1..23: mol_type = other DNA
  modified_base 1: mod_base = OTHER; note = 2'-O-methyluridine-3'-phosphorothioate 5'-(E)-Vinylphosphonate
  modified_base 2: mod_base = OTHER; note = 2'-deoxythymidine-3'-phosphorothioate
  modified_base 3: mod_base = OTHER; note = 2'-O-methylguanosine-3'-phosphate
  modified_base 4: mod_base = OTHER; note = 2'-O-methyladenosine-3'-phosphate
  modified_base 6: mod_base = OTHER; note = 2'-O-methyladenosine-3'-phosphate
  modified_base 7: mod_base = OTHER; note = Thymidine-glycol nucleic acid (GNA), S-Isomer
  modified_base 8: mod_base = OTHER; note = 2'-O-methyluridine-3'-phosphate
  modified_base 9: mod_base = OTHER; note = 2'-O-methyladenosine-3'-phosphate
  modified_base 10: mod_base = OTHER; note = 2'-O-methyluridine-3'-phosphate
  modified_base 11: mod_base = OTHER; note = 2'-O-methylcytidine-3'-phosphate
  modified_base 13: mod_base = OTHER; note = 2'-O-methyluridine-3'-phosphate
  modified_base 14: mod_base = OTHER; note = 2'-deoxy-2'-fluorouridine-3'-phosphate
  modified_base 15: mod_base = OTHER; note = 2'-O-methyluridine-3'-phosphate
  modified_base 16: mod_base = OTHER; note = 2'-O-methylguanosine-3'-phosphate
  modified_base 17: mod_base = OTHER; note = 2'-O-methyladenosine-3'-phosphate
  modified_base 18: mod_base = OTHER; note = 2'-O-methylguanosine-3'-phosphate
  modified_base 19: mod_base = OTHER; note = 2'-O-methylcytidine-3'-phosphate
  modified_base 20: mod_base = OTHER; note = 2'-O-methylcytidine-3'-phosphate
  modified_base 21: mod_base = OTHER; note = 2'-O-methyladenosine-3'-phosphorothioate
  modified_base 22: mod_base = OTHER; note = 2'-O-methylcytidine-3'-phosphorothioate
  modified_base 23: mod_base = OTHER; note = 2'-O-methyladenosine
  misc_feature 1: note = RNA
  misc_feature 3..4: note = RNA
  misc_feature 6..11: note = RNA
  misc_feature 13..23: note = RNA
  misc_feature 2: note = DNA
  misc_feature 5: note = DNA
  misc_feature 12: note = DNA
ttgatattatcctttgagccaca

SEQ ID NO: 298 - DNA, 23 bp, synthetic construct
  source 1..23: mol_type = other DNA
  modified_base 1: mod_base = OTHER; note = 2'-O-methyluridine-3'-phosphorothioate 5'-(E)-Vinylphosphonate
  modified_base 2: mod_base = OTHER; note = 2'-deoxythymidine-3'-phosphorothioate
  modified_base 3: mod_base = OTHER; note = 2'-O-methyluridine-3'-phosphate
  modified_base 4: mod_base = OTHER; note = 2'-O-methylguanosine-3'-phosphate
  modified_base 6: mod_base = OTHER; note = 2'-O-methyluridine-3'-phosphate
  modified_base 8: mod_base = OTHER; note = 2'-O-methyluridine-3'-phosphate
  modified_base 9: mod_base = OTHER; note = 2'-O-methyluridine-3'-phosphate
  modified_base 10: mod_base = OTHER; note = 2'-O-methyladenosine-3'-phosphate
  modified_base 11: mod_base = OTHER; note = 2'-O-methyluridine-3'-phosphate
  modified_base 13: mod_base = OTHER; note = 2'-O-methylcytidine-3'-phosphate
  modified_base 14: mod_base = OTHER; note = 2'-deoxy-2'-fluorouridine-3'-phosphate
  modified_base 15: mod_base = OTHER; note = 2'-O-methyluridine-3'-phosphate
  modified_base 16: mod_base = OTHER; note = 2'-O-methyluridine-3'-phosphate
  modified_base 17: mod_base = OTHER; note = 2'-O-methylguanosine-3'-phosphate
  modified_base 18: mod_base = OTHER; note = 2'-O-methyladenosine-3'-phosphate
  modified_base 19: mod_base = OTHER; note = 2'-O-methylguanosine-3'-phosphate
  modified_base 20: mod_base = OTHER; note = 2'-O-methylcytidine-3'-phosphate
  modified_base 21: mod_base = OTHER; note = 2'-O-methylcytidine-3'-phosphorothioate
  modified_base 22: mod_base = OTHER; note = 2'-O-methyladenosine-3'-phosphorothioate
  modified_base 23: mod_base = OTHER; note = 2'-O-methylcytidine
  misc_feature 1: note = RNA
  misc_feature 3..4: note = RNA
  misc_feature 6: note = RNA
  misc_feature 8..11: note = RNA
  misc_feature 13..23: note = RNA
  misc_feature 2: note = DNA
  misc_feature 5: note = DNA
  misc_feature 7: note = DNA
  misc_feature 12: note = DNA
tttgatattatcctttgagccac

SEQ ID NO: 299 - DNA, 23 bp, synthetic construct
  source 1..23: mol_type = other DNA
  modified_base 1: mod_base = OTHER; note = 2'-O-methyluridine-3'-phosphorothioate 5'-(E)-Vinylphosphonate
  modified_base 2: mod_base = OTHER; note = 2'-deoxythymidine-3'-phosphorothioate
  modified_base 3: mod_base = OTHER; note = 2'-O-methyluridine-3'-phosphate
  modified_base 4: mod_base = OTHER; note = 2'-O-methyluridine-3'-phosphate
  modified_base 6: mod_base = OTHER; note = 2'-O-methyladenosine-3'-phosphate
  modified_base 7: mod_base = OTHER; note = Thymidine-glycol nucleic acid (GNA), S-Isomer
  modified_base 8: mod_base = OTHER; note = 2'-O-methyladenosine-3'-phosphate
  modified_base 9: mod_base = OTHER; note = 2'-O-methyluridine-3'-phosphate
  modified_base 10: mod_base = OTHER; note = 2'-O-methyluridine-3'-phosphate
  modified_base 11: mod_base = OTHER; note = 2'-O-methyladenosine-3'-phosphate
  modified_base 13: mod_base = OTHER; note = 2'-O-methylcytidine-3'-phosphate
  modified_base 14: mod_base = OTHER; note = 2'-deoxy-2'-fluorocytidine-3'-phosphate
  modified_base 15: mod_base = OTHER; note = 2'-O-methyluridine-3'-phosphate
  modified_base 16: mod_base = OTHER; note = 2'-O-methyluridine-3'-phosphate
  modified_base 17: mod_base = OTHER; note = 2'-O-methyluridine-3'-phosphate
  modified_base 18: mod_base = OTHER; note = 2'-O-methylguanosine-3'-phosphate
  modified_base 19: mod_base = OTHER; note = 2'-O-methyladenosine-3'-phosphate
  modified_base 20: mod_base = OTHER; note = 2'-O-methylguanosine-3'-phosphate
  modified_base 21: mod_base = OTHER; note = 2'-O-methylcytidine-3'-phosphorothioate
  modified_base 22: mod_base = OTHER; note = 2'-O-methylcytidine-3'-phosphorothioate
  modified_base 23: mod_base = OTHER; note = 2'-O-methyladenosine
  misc_feature 1: note = RNA
  misc_feature 3..4: note = RNA
  misc_feature 6..11: note = RNA
  misc_feature 13..23: note = RNA
  misc_feature 2: note = DNA
  misc_feature 5: note = DNA
  misc_feature 12: note = DNA
ttttgatattatcctttgagcca

SEQ ID NO: 300 - DNA, 23 bp, synthetic construct
  source 1..23: mol_type = other DNA
  modified_base 1: mod_base = OTHER; note = 2'-O-methyluridine-3'-phosphorothioate 5'-(E)-Vinylphosphonate
  modified_base 2: mod_base = OTHER; note = 2'-deoxyguanosine-3'-phosphorothioate
  modified_base 3: mod_base = OTHER; note = 2'-O-methyluridine-3'-phosphate
  modified_base 4: mod_base = OTHER; note = 2'-O-methyluridine-3'-phosphate
  modified_base 6: mod_base = OTHER; note = 2'-O-methylguanosine-3'-phosphate
  modified_base 7: mod_base = OTHER; note = Adenosine-glycol nucleic acid (GNA), S-isomer
  modified_base 8: mod_base = OTHER; note = 2'-O-methyluridine-3'-phosphate
  modified_base 9: mod_base = OTHER; note = 2'-O-methyladenosine-3'-phosphate
  modified_base 10: mod_base = OTHER; note = 2'-O-methyluridine-3'-phosphate
  modified_base 11: mod_base = OTHER; note = 2'-O-methyluridine-3'-phosphate
  modified_base 13: mod_base = OTHER; note = 2'-O-methyluridine-3'-phosphate
  modified_base 14: mod_base = OTHER; note = 2'-deoxy-2'-fluorocytidine-3'-phosphate
  modified_base 15: mod_base = OTHER; note = 2'-O-methylcytidine-3'-phosphate
  modified_base 16: mod_base = OTHER; note = 2'-O-methyluridine-3'-phosphate
  modified_base 17: mod_base = OTHER; note = 2'-O-methyluridine-3'-phosphate
  modified_base 18: mod_base = OTHER; note = 2'-O-methyluridine-3'-phosphate
  modified_base 19: mod_base = OTHER; note = 2'-O-methylguanosine-3'-phosphate
  modified_base 20: mod_base = OTHER; note = 2'-O-methyladenosine-3'-phosphate
  modified_base 21: mod_base = OTHER; note = 2'-O-methylguanosine-3'-phosphorothioate
  modified_base 22: mod_base = OTHER; note = 2'-O-methylcytidine-3'-phosphorothioate
  modified_base 23: mod_base = OTHER; note = 2'-O-methylcytidine
  misc_feature 1: note = RNA
  misc_feature 3..4: note = RNA
  misc_feature 6..11: note = RNA
  misc_feature 13..23: note = RNA
  misc_feature 2: note = DNA
  misc_feature 5: note = DNA
  misc_feature 12: note = DNA
tgtttgatattatcctttgagcc

SEQ ID NO: 301 - DNA, 23 bp, synthetic construct
  source 1..23: mol_type = other DNA
  modified_base 1: mod_base = OTHER; note = 2'-O-methyluridine-3'-phosphorothioate 5'-(E)-Vinylphosphonate
  modified_base 2: mod_base = OTHER; note = 2'-deoxythymidine-3'-phosphorothioate
  modified_base 3: mod_base = OTHER; note = 2'-O-methylguanosine-3'-phosphate
  modified_base 4: mod_base = OTHER; note = 2'-O-methyluridine-3'-phosphate
  modified_base 6: mod_base = OTHER; note = 2'-O-methyluridine-3'-phosphate
  modified_base 7: mod_base = OTHER; note = guanosine-2'-phosphate
  modified_base 8: mod_base = OTHER; note = 2'-O-methyladenosine-3'-phosphate
  modified_base 9: mod_base = OTHER; note = 2'-O-methyluridine-3'-phosphate
  modified_base 10: mod_base = OTHER; note = 2'-O-methyladenosine-3'-phosphate
  modified_base 11: mod_base = OTHER; note = 2'-O-methyluridine-3'-phosphate
  modified_base 13: mod_base = OTHER; note = 2'-O-methyladenosine-3'-phosphate
  modified_base 14: mod_base = OTHER; note = 2'-deoxy-2'-fluorouridine-3'-phosphate
  modified_base 15: mod_base = OTHER; note = 2'-O-methylcytidine-3'-phosphate
  modified_base 16: mod_base = OTHER; note = 2'-O-methylcytidine-3'-phosphate
  modified_base 17: mod_base = OTHER; note = 2'-O-methyluridine-3'-phosphate
  modified_base 18: mod_base = OTHER; note = 2'-O-methyluridine-3'-phosphate
  modified_base 19: mod_base = OTHER; note = 2'-O-methyluridine-3'-phosphate
  modified_base 20: mod_base = OTHER; note = 2'-O-methylguanosine-3'-phosphate
  modified_base 21: mod_base = OTHER; note = 2'-O-methyladenosine-3'-phosphorothioate
  modified_base 22: mod_base = OTHER; note = 2'-O-methylguanosine-3'-phosphorothioate
  modified_base 23: mod_base = OTHER; note = 2'-O-methylcytidine
  misc_feature 1: note = RNA
  misc_feature 3..4: note = RNA
  misc_feature 6..11: note = RNA
  misc_feature 13..23: note = RNA
  misc_feature 2: note = DNA
  misc_feature 5: note = DNA
  misc_feature 12: note = DNA
ttgtttgatattatcctttgagc

SEQ ID NO: 302 - DNA, 23 bp, synthetic construct
  source 1..23: mol_type = other DNA
  modified_base 1: mod_base = OTHER; note = 2'-O-methyluridine-3'-phosphorothioate 5'-(E)-Vinylphosphonate
  modified_base 2: mod_base = OTHER; note = 2'-deoxyguanosine-3'-phosphorothioate
  modified_base 3: mod_base = OTHER; note = 2'-O-methyluridine-3'-phosphate
  modified_base 4: mod_base = OTHER; note = 2'-O-methylguanosine-3'-phosphate
  modified_base 6: mod_base = OTHER; note = 2'-O-methyluridine-3'-phosphate
  modified_base 7: mod_base = OTHER; note = Thymidine-glycol nucleic acid (GNA), S-Isomer
  modified_base 8: mod_base = OTHER; note = 2'-O-methylguanosine-3'-phosphate
  modified_base 9: mod_base = OTHER; note = 2'-O-methyladenosine-3'-phosphate
  modified_base 10: mod_base = OTHER; note = 2'-O-methyluridine-3'-phosphate
  modified_base 11: mod_base = OTHER; note = 2'-O-methyladenosine-3'-phosphate
  modified_base 13: mod_base = OTHER; note = 2'-O-methyluridine-3'-phosphate
  modified_base 14: mod_base = OTHER; note = 2'-deoxy-2'-fluoroadenosine-3'-phosphate
  modified_base 15: mod_base = OTHER; note = 2'-O-methyluridine-3'-phosphate
  modified_base 16: mod_base = OTHER; note = 2'-O-methylcytidine-3'-phosphate
  modified_base 17: mod_base = OTHER; note = 2'-O-methylcytidine-3'-phosphate
  modified_base 18: mod_base = OTHER; note = 2'-O-methyluridine-3'-phosphate
  modified_base 19: mod_base = OTHER; note = 2'-O-methyluridine-3'-phosphate
  modified_base 20: mod_base = OTHER; note = 2'-O-methyluridine-3'-phosphate
  modified_base 21: mod_base = OTHER; note = 2'-O-methylguanosine-3'-phosphorothioate
  modified_base 22: mod_base = OTHER; note = 2'-O-methyladenosine-3'-phosphorothioate
  modified_base 23: mod_base = OTHER; note = 2'-O-methylguanosine
  misc_feature 1: note = RNA
  misc_feature 3..4: note = RNA
  misc_feature 6..11: note = RNA
  misc_feature 13..23: note = RNA
  misc_feature 2: note = DNA
  misc_feature 5: note = DNA
  misc_feature 12: note = DNA
tgtgtttgatattatcctttgag

SEQ ID NO: 303 - DNA, 23 bp, synthetic construct
  source 1..23: mol_type = other DNA
  modified_base 1: mod_base = OTHER; note = 2'-O-methyluridine-3'-phosphorothioate 5'-(E)-Vinylphosphonate
  modified_base 2: mod_base = OTHER; note = 2'-deoxycytidine-3'-phosphorothioate
  modified_base 3: mod_base = OTHER; note = 2'-O-methylguanosine-3'-phosphate
  modified_base 4: mod_base = OTHER; note = 2'-O-methyluridine-3'-phosphate
  modified_base 6: mod_base = OTHER; note = 2'-O-methyluridine-3'-phosphate
  modified_base 7: mod_base = OTHER; note = Thymidine-glycol nucleic acid (GNA), S-Isomer
  modified_base 8: mod_base = OTHER; note = 2'-O-methyluridine-3'-phosphate
  modified_base 9: mod_base = OTHER; note = 2'-O-methylguanosine-3'-phosphate
  modified_base 10: mod_base = OTHER; note = 2'-O-methyladenosine-3'-phosphate
  modified_base 11: mod_base = OTHER; note = 2'-O-methyluridine-3'-phosphate
  modified_base 13: mod_base = OTHER; note = 2'-O-methyluridine-3'-phosphate
  modified_base 14: mod_base = OTHER; note = 2'-deoxy-2'-fluorouridine-3'-phosphate
  modified_base 15: mod_base = OTHER; note = 2'-O-methyladenosine-3'-phosphate
  modified_base 16: mod_base = OTHER; note = 2'-O-methyluridine-3'-phosphate
  modified_base 17: mod_base = OTHER; note = 2'-O-methylcytidine-3'-phosphate
  modified_base 18: mod_base = OTHER; note = 2'-O-methylcytidine-3'-phosphate
  modified_base 19: mod_base = OTHER; note = 2'-O-methyluridine-3'-phosphate
  modified_base 20: mod_base = OTHER; note = 2'-O-methyluridine-3'-phosphate
  modified_base 21: mod_base = OTHER; note = 2'-O-methyluridine-3'-phosphorothioate
  modified_base 22: mod_base = OTHER; note = 2'-O-methylguanosine-3'-phosphorothioate
  modified_base 23: mod_base = OTHER; note = 2'-O-methyladenosine
  misc_feature 1: note = RNA
  misc_feature 3..4: note = RNA
  misc_feature 6..11: note = RNA
  misc_feature 13..23: note = RNA
  misc_feature 2: note = DNA
  misc_feature 5: note = DNA
  misc_feature 12: note = DNA
tcgtgtttgatattatcctttga

SEQ ID NO: 304 - DNA, 23 bp, synthetic construct
  source 1..23: mol_type = other DNA
  modified_base 1: mod_base = OTHER; note = 2'-O-methyluridine-3'-phosphorothioate 5'-(E)-Vinylphosphonate
  modified_base 2: mod_base = OTHER; note = 2'-deoxyadenosine-3'-phosphorothioate
  modified_base 3: mod_base = OTHER; note = 2'-O-methylcytidine-3'-phosphate
  modified_base 4: mod_base = OTHER; note = 2'-O-methylguanosine-3'-phosphate
  modified_base 6: mod_base = OTHER; note = 2'-O-methylguanosine-3'-phosphate
  modified_base 7: mod_base = OTHER; note = Thymidine-glycol nucleic acid (GNA), S-Isomer
  modified_base 8: mod_base = OTHER; note = 2'-O-methyluridine-3'-phosphate
  modified_base 9: mod_base = OTHER; note = 2'-O-methyluridine-3'-phosphate
  modified_base 10: mod_base = OTHER; note = 2'-O-methylguanosine-3'-phosphate
  modified_base 11: mod_base = OTHER; note = 2'-O-methyladenosine-3'-phosphate
  modified_base 13: mod_base = OTHER; note = 2'-O-methyladenosine-3'-phosphate
  modified_base 14: mod_base = OTHER; note = 2'-deoxy-2'-fluorouridine-3'-phosphate
  modified_base 15: mod_base = OTHER; note = 2'-O-methyluridine-3'-phosphate
  modified_base 16: mod_base = OTHER; note = 2'-O-methyladenosine-3'-phosphate
  modified_base 17: mod_base = OTHER; note = 2'-O-methyluridine-3'-phosphate
  modified_base 18: mod_base = OTHER; note = 2'-O-methylcytidine-3'-phosphate
  modified_base 19: mod_base = OTHER; note = 2'-O-methylcytidine-3'-phosphate
  modified_base 20: mod_base = OTHER; note = 2'-O-methyluridine-3'-phosphate
  modified_base 21: mod_base = OTHER; note = 2'-O-methyluridine-3'-phosphorothioate
  modified_base 22: mod_base = OTHER; note = 2'-O-methyluridine-3'-phosphorothioate
  modified_base 23: mod_base = OTHER; note = 2'-O-methylguanosine
  misc_feature 1: note = RNA
  misc_feature 3..4: note = RNA
  misc_feature 6..11: note = RNA
  misc_feature 13..23: note = RNA
  misc_feature 2: note = DNA
  misc_feature 5: note = DNA
  misc_feature 12: note = DNA
tacgtgtttgatattatcctttg

SEQ ID NO: 305 - DNA, 23 bp, synthetic construct
  source 1..23: mol_type = other DNA
  modified_base 1: mod_base = OTHER; note = 2'-O-methyluridine-3'-phosphorothioate 5'-(E)-Vinylphosphonate
  modified_base 2: mod_base = OTHER; note = 2'-deoxyguanosine-3'-phosphorothioate
  modified_base 3: mod_base = OTHER; note = 2'-O-methyladenosine-3'-phosphate
  modified_base 4: mod_base = OTHER; note = 2'-O-methylcytidine-3'-phosphate
  modified_base 6: mod_base = OTHER; note = 2'-O-methyluridine-3'-phosphate
  modified_base 7: mod_base = OTHER; note = guanosine-2'-phosphate
  modified_base 8: mod_base = OTHER; note = 2'-O-methyluridine-3'-phosphate
  modified_base 9: mod_base = OTHER; note = 2'-O-methyluridine-3'-phosphate
  modified_base 10: mod_base = OTHER; note = 2'-O-methyluridine-3'-phosphate
  modified_base 11: mod_base = OTHER; note = 2'-O-methylguanosine-3'-phosphate
  modified_base 13: mod_base = OTHER; note = 2'-O-methyluridine-3'-phosphate
  modified_base 14: mod_base = OTHER; note = 2'-deoxy-2'-fluoroadenosine-3'-phosphate
  modified_base 15: mod_base = OTHER; note = 2'-O-methyluridine-3'-phosphate
  modified_base 16: mod_base = OTHER; note = 2'-O-methyluridine-3'-phosphate
  modified_base 17: mod_base = OTHER; note = 2'-O-methyladenosine-3'-phosphate
  modified_base 18: mod_base = OTHER; note = 2'-O-methyluridine-3'-phosphate
  modified_base 19: mod_base = OTHER; note = 2'-O-methylcytidine-3'-phosphate
  modified_base 20: mod_base = OTHER; note = 2'-O-methylcytidine-3'-phosphate
  modified_base 21: mod_base = OTHER; note = 2'-O-methyluridine-3'-phosphorothioate
  modified_base 22: mod_base = OTHER; note = 2'-O-methyluridine-3'-phosphorothioate
  modified_base 23: mod_base = OTHER; note = 2'-O-methyluridine
  misc_feature 1: note = RNA
  misc_feature 3..4: note = RNA
  misc_feature 6..11: note = RNA
  misc_feature 13..23: note = RNA
  misc_feature 2: note = DNA
  misc_feature 5: note = DNA
  misc_feature 12: note = DNA
tgacgtgtttgatattatccttt

SEQ ID NO: 306 - DNA, 23 bp, synthetic construct
  source 1..23: mol_type = other DNA
  modified_base 1: mod_base = OTHER; note = 2'-O-methyluridine-3'-phosphorothioate 5'-(E)-Vinylphosphonate
  modified_base 2: mod_base = OTHER; note = 2'-deoxyguanosine-3'-phosphorothioate
  modified_base 3: mod_base = OTHER; note = 2'-O-methylguanosine-3'-phosphate
  modified_base 4: mod_base = OTHER; note = 2'-O-methyladenosine-3'-phosphate
  modified_base 6: mod_base = OTHER; note = 2'-O-methylguanosine-3'-phosphate
  modified_base 8: mod_base = OTHER; note = 2'-O-methylguanosine-3'-phosphate
  modified_base 9: mod_base = OTHER; note = 2'-O-methyluridine-3'-phosphate
  modified_base 10: mod_base = OTHER; note = 2'-O-methyluridine-3'-phosphate
  modified_base 11: mod_base = OTHER; note = 2'-O-methyluridine-3'-phosphate
  modified_base 13: mod_base = OTHER; note = 2'-O-methyladenosine-3'-phosphate
  modified_base 14: mod_base = OTHER; note = 2'-deoxy-2'-fluorouridine-3'-phosphate
  modified_base 15: mod_base = OTHER; note = 2'-O-methyladenosine-3'-phosphate
  modified_base 16: mod_base = OTHER; note = 2'-O-methyluridine-3'-phosphate
  modified_base 17: mod_base = OTHER; note = 2'-O-methyluridine-3'-phosphate
  modified_base 18: mod_base = OTHER; note = 2'-O-methyladenosine-3'-phosphate
  modified_base 19: mod_base = OTHER; note = 2'-O-methyluridine-3'-phosphate
  modified_base 20: mod_base = OTHER; note = 2'-O-methylcytidine-3'-phosphate
  modified_base 21: mod_base = OTHER; note = 2'-O-methylcytidine-3'-phosphorothioate
  modified_base 22: mod_base = OTHER; note = 2'-O-methyluridine-3'-phosphorothioate
  modified_base 23: mod_base = OTHER; note = 2'-O-methyluridine
  misc_feature 1: note = RNA
  misc_feature 3..4: note = RNA
  misc_feature 6: note = RNA
  misc_feature 8..11: note = RNA
  misc_feature 13..23: note = RNA
  misc_feature 2: note = DNA
  misc_feature 5: note = DNA
  misc_feature 7: note = DNA
  misc_feature 12: note = DNA
tggacgtgtttgatattatcctt

SEQ ID NO: 307 - DNA, 23 bp, synthetic construct
  source 1..23: mol_type = other DNA
  modified_base 1: mod_base = OTHER; note = 2'-O-methyluridine-3'-phosphorothioate 5'-(E)-Vinylphosphonate
  modified_base 2: mod_base = OTHER; note = 2'-deoxyguanosine-3'-phosphorothioate
  modified_base 3: mod_base = OTHER; note = 2'-O-methylguanosine-3'-phosphate
  modified_base 4: mod_base = OTHER; note = 2'-O-methylguanosine-3'-phosphate
  modified_base 6: mod_base = OTHER; note = 2'-O-methylcytidine-3'-phosphate
  modified_base 7: mod_base = OTHER; note = guanosine-2'-phosphate
  modified_base 8: mod_base = OTHER; note = 2'-O-methyluridine-3'-phosphate
  modified_base 9: mod_base = OTHER; note = 2'-O-methylguanosine-3'-phosphate
  modified_base 10: mod_base = OTHER; note = 2'-O-methyluridine-3'-phosphate
  modified_base 11: mod_base = OTHER; note = 2'-O-methyluridine-3'-phosphate
  modified_base 13: mod_base = OTHER; note = 2'-O-methylguanosine-3'-phosphate
  modified_base 14: mod_base = OTHER; note = 2'-deoxy-2'-fluoroadenosine-3'-phosphate
  modified_base 15: mod_base = OTHER; note = 2'-O-methyluridine-3'-phosphate
  modified_base 16: mod_base = OTHER; note = 2'-O-methyladenosine-3'-phosphate
  modified_base 17: mod_base = OTHER; note = 2'-O-methyluridine-3'-phosphate
  modified_base 18: mod_base = OTHER; note = 2'-O-methyluridine-3'-phosphate
  modified_base 19: mod_base = OTHER; note = 2'-O-methyladenosine-3'-phosphate
  modified_base 20: mod_base = OTHER; note = 2'-O-methyluridine-3'-phosphate
  modified_base 21: mod_base = OTHER; note = 2'-O-methylcytidine-3'-phosphorothioate
  modified_base 22: mod_base = OTHER; note = 2'-O-methylcytidine-3'-phosphorothioate
  modified_base 23: mod_base = OTHER; note = 2'-O-methyluridine
  misc_feature 1: note = RNA
  misc_feature 3..4: note = RNA
  misc_feature 6..11: note = RNA
  misc_feature 13..23: note = RNA
  misc_feature 2: note = DNA
  misc_feature 5: note = DNA
  misc_feature 12: note = DNA
tgggacgtgtttgatattatcct

SEQ ID NO: 308 - DNA, 23 bp, synthetic construct
  source 1..23: mol_type = other DNA
  modified_base 1: mod_base = OTHER; note = 2'-O-methyluridine-3'-phosphorothioate 5'-(E)-Vinylphosphonate
  modified_base 2: mod_base = OTHER; note = 2'-deoxycytidine-3'-phosphorothioate
  modified_base 3: mod_base = OTHER; note = 2'-O-methylguanosine-3'-phosphate
  modified_base 4: mod_base = OTHER; note = 2'-O-methylguanosine-3'-phosphate
  modified_base 6: mod_base = OTHER; note = 2'-O-methyladenosine-3'-phosphate
  modified_base 8: mod_base = OTHER; note = 2'-O-methylguanosine-3'-phosphate
  modified_base 9: mod_base = OTHER; note = 2'-O-methyluridine-3'-phosphate
  modified_base 10: mod_base = OTHER; note = 2'-O-methylguanosine-3'-phosphate
  modified_base 11: mod_base = OTHER; note = 2'-O-methyluridine-3'-phosphate
  modified_base 13: mod_base = OTHER; note = 2'-O-methyluridine-3'-phosphate
  modified_base 14: mod_base = OTHER; note = 2'-deoxy-2'-fluoroguanosine-3'-phosphate
  modified_base 15: mod_base = OTHER; note = 2'-O-methyladenosine-3'-phosphate
  modified_base 16: mod_base = OTHER; note = 2'-O-methyluridine-3'-phosphate
  modified_base 17: mod_base = OTHER; note = 2'-O-methyladenosine-3'-phosphate
  modified_base 18: mod_base = OTHER; note = 2'-O-methyluridine-3'-phosphate
  modified_base 19: mod_base = OTHER; note = 2'-O-methyluridine-3'-phosphate
  modified_base 20: mod_base = OTHER; note = 2'-O-methyladenosine-3'-phosphate
  modified_base 21: mod_base = OTHER; note = 2'-O-methyluridine-3'-phosphorothioate
  modified_base 22: mod_base = OTHER; note = 2'-O-methylcytidine-3'-phosphorothioate
  modified_base 23: mod_base = OTHER; note = 2'-O-methylcytidine
  misc_feature 1: note = RNA
  misc_feature 3..4: note = RNA
  misc_feature 6: note = RNA
  misc_feature 8..11: note = RNA
  misc_feature 13..23: note = RNA
  misc_feature 2: note = DNA
  misc_feature 5: note = DNA
  misc_feature 7: note = DNA
  misc_feature 12: note = DNA
tcgggacgtgtttgatattatcc

SEQ ID NO: 309 - DNA, 23 bp, synthetic construct
  source 1..23: mol_type = other DNA
  modified_base 1: mod_base = OTHER; note = 2'-O-methyluridine-3'-phosphorothioate 5'-(E)-Vinylphosphonate
  modified_base 2: mod_base = OTHER; note = 2'-deoxycytidine-3'-phosphorothioate
  modified_base 3: mod_base = OTHER; note = 2'-O-methylcytidine-3'-phosphate
  modified_base 4: mod_base = OTHER; note = 2'-O-methylguanosine-3'-phosphate
  modified_base 6: mod_base = OTHER; note = 2'-O-methylguanosine-3'-phosphate
  modified_base 7: mod_base = OTHER; note = Adenosine-glycol nucleic acid (GNA), S-isomer
  modified_base 8: mod_base = OTHER; note = 2'-O-methylcytidine-3'-phosphate
  modified_base 9: mod_base = OTHER; note = 2'-O-methylguanosine-3'-phosphate
  modified_base 10: mod_base = OTHER; note = 2'-O-methyluridine-3'-phosphate
  modified_base 11: mod_base = OTHER; note = 2'-O-methylguanosine-3'-phosphate
  modified_base 13: mod_base = OTHER; note = 2'-O-methyluridine-3'-phosphate
  modified_base 14: mod_base = OTHER; note = 2'-deoxy-2'-fluorouridine-3'-phosphate
  modified_base 15: mod_base = OTHER; note = 2'-O-methylguanosine-3'-phosphate
  modified_base 16: mod_base = OTHER; note = 2'-O-methyladenosine-3'-phosphate
  modified_base 17: mod_base = OTHER; note = 2'-O-methyluridine-3'-phosphate
  modified_base 18: mod_base = OTHER; note = 2'-O-methyladenosine-3'-phosphate
  modified_base 19: mod_base = OTHER; note = 2'-O-methyluridine-3'-phosphate
  modified_base 20: mod_base = OTHER; note = 2'-O-methyluridine-3'-phosphate
  modified_base 21: mod_base = OTHER; note = 2'-O-methyladenosine-3'-phosphorothioate
  modified_base 22: mod_base = OTHER; note = 2'-O-methyluridine-3'-phosphorothioate
  modified_base 23: mod_base = OTHER; note = 2'-O-methylcytidine
  misc_feature 1: note = RNA
  misc_feature 3..4: note = RNA
  misc_feature 6..11: note = RNA
  misc_feature 13..23: note = RNA
  misc_feature 2: note = DNA
  misc_feature 5: note = DNA
  misc_feature 12: note = DNA
tccgggacgtgtttgatattatc

SEQ ID NO: 310 - DNA, 23 bp, synthetic construct
  source 1..23: mol_type = other DNA
  modified_base 1: mod_base = OTHER; note = 2'-O-methyluridine-3'-phosphorothioate 5'-(E)-Vinylphosphonate
  modified_base 2: mod_base = OTHER; note = 2'-deoxy-2'-fluorocytidine-3'-phosphorothioate
  modified_base 3: mod_base = OTHER; note = 2'-O-methylcytidine-3'-phosphate
  modified_base 4: mod_base = OTHER; note = 2'-O-methylguanosine-3'-phosphate
  modified_base 6: mod_base = OTHER; note = 2'-O-methylguanosine-3'-phosphate
  modified_base 7: mod_base = OTHER; note = Adenosine-glycol nucleic acid (GNA), S-isomer
  modified_base 8: mod_base = OTHER; note = 2'-O-methylcytidine-3'-phosphate
  modified_base 9: mod_base = OTHER; note = 2'-O-methylguanosine-3'-phosphate
  modified_base 10: mod_base = OTHER; note = 2'-O-methyluridine-3'-phosphate
  modified_base 11: mod_base = OTHER; note = 2'-O-methylguanosine-3'-phosphate
  modified_base 12: mod_base = OTHER; note = 2'-O-methyluridine-3'-phosphate
  modified_base 13: mod_base = OTHER; note = 2'-O-methyluridine-3'-phosphate
  modified_base 14: mod_base = OTHER; note = 2'-deoxy-2'-fluorouridine-3'-phosphate
  modified_base 15: mod_base = OTHER; note = 2'-O-methylguanosine-3'-phosphate
  modified_base 16: mod_base = OTHER; note = 2'-deoxy-2'-fluoroadenosine-3'-phosphate
  modified_base 17: mod_base = OTHER; note = 2'-O-methyluridine-3'-phosphate
  modified_base 18: mod_base = OTHER; note = 2'-O-methyladenosine-3'-phosphate
  modified_base 19: mod_base = OTHER; note = 2'-O-methyluridine-3'-phosphate
  modified_base 20: mod_base = OTHER; note = 2'-O-methyluridine-3'-phosphate
  modified_base 21: mod_base = OTHER; note = 2'-O-methyladenosine-3'-phosphorothioate
  modified_base 22: mod_base = OTHER; note = 2'-O-methyluridine-3'-phosphorothioate
  modified_base 23: mod_base = OTHER; note = 2'-O-methylcytidine
  misc_feature 1..4: note = RNA
  misc_feature 6..23: note = RNA
  misc_feature 5: note = DNA
tccgggacgtgtttgatattatc

SEQ ID NO: 311 - DNA, 23 bp, synthetic construct
  source 1..23: mol_type = other DNA
  modified_base 1: mod_base = OTHER; note = 2'-O-methyluridine-3'-phosphorothioate 5'-(E)-Vinylphosphonate
  modified_base 2: mod_base = OTHER; note = 2'-deoxycytidine-3'-phosphorothioate
  modified_base 3: mod_base = OTHER; note = 2'-O-methylcytidine-3'-phosphate
  modified_base 4: mod_base = OTHER; note = 2'-O-methylcytidine-3'-phosphate
  modified_base 6: mod_base = OTHER; note = 2'-O-methylguanosine-3'-phosphate
  modified_base 8: mod_base = OTHER; note = 2'-O-methyladenosine-3'-phosphate
  modified_base 9: mod_base = OTHER; note = 2'-O-methylcytidine-3'-phosphate
  modified_base 10: mod_base = OTHER; note = 2'-O-methylguanosine-3'-phosphate
  modified_base 11: mod_base = OTHER; note = 2'-O-methyluridine-3'-phosphate
  modified_base 13: mod_base = OTHER; note = 2'-O-methyluridine-3'-phosphate
  modified_base 14: mod_base = OTHER; note = 2'-deoxy-2'-fluorouridine-3'-phosphate
  modified_base 15: mod_base = OTHER; note = 2'-O-methyluridine-3'-phosphate
  modified_base 16: mod_base = OTHER; note = 2'-O-methylguanosine-3'-phosphate
  modified_base 17: mod_base = OTHER; note = 2'-O-methyladenosine-3'-phosphate
  modified_base 18: mod_base = OTHER; note = 2'-O-methyluridine-3'-phosphate
  modified_base 19: mod_base = OTHER; note = 2'-O-methyladenosine-3'-phosphate
  modified_base 20: mod_base = OTHER; note = 2'-O-methyluridine-3'-phosphate
  modified_base 21: mod_base = OTHER; note = 2'-O-methyluridine-3'-phosphorothioate
  modified_base 22: mod_base = OTHER; note = 2'-O-methyladenosine-3'-phosphorothioate
  modified_base 23: mod_base = OTHER; note = 2'-O-methyluridine
  misc_feature 1: note = RNA
  misc_feature 3..4: note = RNA
  misc_feature 6: note = RNA
  misc_feature 8..11: note = RNA
  misc_feature 13..23: note = RNA
  misc_feature 2: note = DNA
  misc_feature 5: note = DNA
  misc_feature 7: note = DNA
  misc_feature 12: note = DNA
tcccgggacgtgtttgatattat

SEQ ID NO: 312 - DNA, 23 bp, synthetic construct
  source 1..23: mol_type = other DNA
  modified_base 1: mod_base = OTHER; note = 2'-O-methyluridine-3'-phosphorothioate 5'-(E)-Vinylphosphonate
  modified_base 2: mod_base = OTHER; note = 2'-deoxythymidine-3'-phosphorothioate
  modified_base 3: mod_base = OTHER; note = 2'-O-methylcytidine-3'-phosphate
  modified_base 4: mod_base = OTHER; note = 2'-O-methylcytidine-3'-phosphate
  modified_base 6: mod_base = OTHER; note = 2'-O-methylguanosine-3'-phosphate
  modified_base 7: mod_base = OTHER; note = guanosine-2'-phosphate
  modified_base 8: mod_base = OTHER; note = 2'-O-methylguanosine-3'-phosphate
  modified_base 9: mod_base = OTHER; note = 2'-O-methyladenosine-3'-phosphate
  modified_base 10: mod_base = OTHER; note = 2'-O-methylcytidine-3'-phosphate
  modified_base 11: mod_base = OTHER; note = 2'-O-methylguanosine-3'-phosphate
  modified_base 13: mod_base = OTHER; note = 2'-O-methylguanosine-3'-phosphate
  modified_base 14: mod_base = OTHER; note = 2'-deoxy-2'-fluorouridine-3'-phosphate
  modified_base 15: mod_base = OTHER; note = 2'-O-methyluridine-3'-phosphate
  modified_base 16: mod_base = OTHER; note = 2'-O-methyluridine-3'-phosphate
  modified_base 17: mod_base = OTHER; note = 2'-O-methylguanosine-3'-phosphate
  modified_base 18: mod_base = OTHER; note = 2'-O-methyladenosine-3'-phosphate
  modified_base 19: mod_base = OTHER; note = 2'-O-methyluridine-3'-phosphate
  modified_base 20: mod_base = OTHER; note = 2'-O-methyladenosine-3'-phosphate
  modified_base 21: mod_base = OTHER; note = 2'-O-methyluridine-3'-phosphorothioate
  modified_base 22: mod_base = OTHER; note = 2'-O-methyluridine-3'-phosphorothioate
  modified_base 23: mod_base = OTHER; note = 2'-O-methyladenosine
  misc_feature 1: note = RNA
  misc_feature 3..4: note = RNA
  misc_feature 6..11: note = RNA
  misc_feature 13..23: note = RNA
  misc_feature 2: note = DNA
  misc_feature 5: note = DNA
  misc_feature 12: note = DNA
ttcccgggacgtgtttgatatta

SEQ ID NO: 313 - DNA, 23 bp, synthetic construct
  source 1..23: mol_type = other DNA
  modified_base 1: mod_base = OTHER; note = 2'-O-methyluridine-3'-phosphorothioate 5'-(E)-Vinylphosphonate
  modified_base 2: mod_base = OTHER; note = 2'-deoxy-2'-fluorouridine-3'-phosphorothioate
  modified_base 3: mod_base = OTHER; note = 2'-O-methylcytidine-3'-phosphate
  modified_base 4: mod_base = OTHER; note = 2'-O-methylcytidine-3'-phosphate
  modified_base 6: mod_base = OTHER; note = 2'-O-methylguanosine-3'-phosphate
  modified_base 7: mod_base = OTHER; note = guanosine-2'-phosphate
  modified_base 8: mod_base = OTHER; note = 2'-O-methylguanosine-3'-phosphate
  modified_base 9: mod_base = OTHER; note = 2'-O-methyladenosine-3'-phosphate
  modified_base 10: mod_base = OTHER; note = 2'-O-methylcytidine-3'-phosphate
  modified_base 11: mod_base = OTHER; note = 2'-O-methylguanosine-3'-phosphate
  modified_base 12: mod_base = OTHER; note = 2'-O-methyluridine-3'-phosphate
  modified_base 13: mod_base = OTHER; note = 2'-O-methylguanosine-3'-phosphate
  modified_base 14: mod_base = OTHER; note = 2'-deoxy-2'-fluorouridine-3'-phosphate
  modified_base 15: mod_base = OTHER; note = 2'-O-methyluridine-3'-phosphate
  modified_base 16: mod_base = OTHER; note = 2'-deoxy-2'-fluorouridine-3'-phosphate
  modified_base 17: mod_base = OTHER; note = 2'-O-methylguanosine-3'-phosphate
  modified_base 18: mod_base = OTHER; note = 2'-O-methyladenosine-3'-phosphate
  modified_base 19: mod_base = OTHER; note = 2'-O-methyluridine-3'-phosphate
  modified_base 20: mod_base = OTHER; note = 2'-O-methyladenosine-3'-phosphate
  modified_base 21: mod_base = OTHER; note = 2'-O-methyluridine-3'-phosphorothioate
  modified_base 22: mod_base = OTHER; note = 2'-O-methyluridine-3'-phosphorothioate
  modified_base 23: mod_base = OTHER; note = 2'-O-methyladenosine
  misc_feature 1..4: note = RNA
  misc_feature 6..23: note = RNA
  misc_feature 5: note = DNA
ttcccgggacgtgtttgatatta

SEQ ID NO: 314 - DNA, 23 bp, synthetic construct
  source 1..23: mol_type = other DNA
  modified_base 1: mod_base = OTHER; note = 2'-O-methyluridine-3'-phosphorothioate 5'-(E)-Vinylphosphonate
  modified_base 2: mod_base = OTHER; note = 2'-deoxycytidine-3'-phosphorothioate
  modified_base 3: mod_base = OTHER; note = 2'-O-methyluridine-3'-phosphate
  modified_base 4: mod_base = OTHER; note = 2'-O-methylcytidine-3'-phosphate
  modified_base 6: mod_base = OTHER; note = 2'-O-methylcytidine-3'-phosphate
  modified_base 8: mod_base = OTHER; note = 2'-O-methylguanosine-3'-phosphate
  modified_base 9: mod_base = OTHER; note = 2'-O-methylguanosine-3'-phosphate
  modified_base 10: mod_base = OTHER; note = 2'-O-methyladenosine-3'-phosphate
  modified_base 11: mod_base = OTHER; note = 2'-O-methylcytidine-3'-phosphate
  modified_base 13: mod_base = OTHER; note = 2'-O-methyluridine-3'-phosphate
  modified_base 14: mod_base = OTHER; note = 2'-deoxy-2'-fluoroguanosine-3'-phosphate
  modified_base 15: mod_base = OTHER; note = 2'-O-methyluridine-3'-phosphate
  modified_base 16: mod_base = OTHER; note = 2'-O-methyluridine-3'-phosphate
  modified_base 17: mod_base = OTHER; note = 2'-O-methyluridine-3'-phosphate
  modified_base 18: mod_base = OTHER; note = 2'-O-methylguanosine-3'-phosphate
  modified_base 19: mod_base = OTHER; note = 2'-O-methyladenosine-3'-phosphate
  modified_base 20: mod_base = OTHER; note = 2'-O-methyluridine-3'-phosphate
  modified_base 21: mod_base = OTHER; note = 2'-O-methyladenosine-3'-phosphorothioate
  modified_base 22: mod_base = OTHER; note = 2'-O-methyluridine-3'-phosphorothioate
  modified_base 23: mod_base = OTHER; note = 2'-O-methyluridine
  misc_feature 1: note = RNA
  misc_feature 3..4: note = RNA
  misc_feature 6: note = RNA
  misc_feature 8..11: note = RNA
  misc_feature 13..23: note = RNA
  misc_feature 2: note = DNA
  misc_feature 5: note = DNA
  misc_feature 7: note = DNA
  misc_feature 12: note = DNA
tctcccgggacgtgtttgatatt

SEQ ID NO: 315 - DNA, 23 bp, synthetic construct
  source 1..23: mol_type = other DNA
  modified_base 1: mod_base = OTHER; note = 2'-O-methyluridine-3'-phosphorothioate 5'-(E)-Vinylphosphonate
  modified_base 2: mod_base = OTHER; note = 2'-deoxycytidine-3'-phosphorothioate
  modified_base 3: mod_base = OTHER; note = 2'-O-methylcytidine-3'-phosphate
  modified_base 4: mod_base = OTHER; note = 2'-O-methyluridine-3'-phosphate
  modified_base 6: mod_base = OTHER; note = 2'-O-methylcytidine-3'-phosphate
  modified_base 8: mod_base = OTHER; note = 2'-O-methylguanosine-3'-phosphate
  modified_base 9: mod_base = OTHER; note = 2'-O-methylguanosine-3'-phosphate
  modified_base 10: mod_base = OTHER; note = 2'-O-methylguanosine-3'-phosphate
  modified_base 11: mod_base = OTHER; note = 2'-O-methyladenosine-3'-phosphate
  modified_base 13: mod_base = OTHER; note = 2'-O-methylguanosine-3'-phosphate
  modified_base 14: mod_base = OTHER; note = 2'-deoxy-2'-fluorouridine-3'-phosphate
  modified_base 15: mod_base = OTHER; note = 2'-O-methylguanosine-3'-phosphate
  modified_base 16: mod_base = OTHER; note = 2'-O-methyluridine-3'-phosphate
  modified_base 17: mod_base = OTHER; note = 2'-O-methyluridine-3'-phosphate
  modified_base 18: mod_base = OTHER; note = 2'-O-methyluridine-3'-phosphate
  modified_base 19: mod_base = OTHER; note = 2'-O-methylguanosine-3'-phosphate
  modified_base 20: mod_base = OTHER; note = 2'-O-methyladenosine-3'-phosphate
  modified_base 21: mod_base = OTHER; note = 2'-O-methyluridine-3'-phosphorothioate
  modified_base 22: mod_base = OTHER; note = 2'-O-methyladenosine-3'-phosphorothioate
  modified_base 23: mod_base = OTHER; note = 2'-O-methyluridine
  misc_feature 1: note = RNA
  misc_feature 3..4: note = RNA
  misc_feature 6: note = RNA
  misc_feature 8..11: note = RNA
  misc_feature 13..23: note = RNA
  misc_feature 2: note = DNA
  misc_feature 5: note = DNA
  misc_feature 7: note = DNA
  misc_feature 12: note = DNA
tcctcccgggacgtgtttgatat

SEQ ID NO: 316 - DNA, 23 bp, synthetic construct
  source 1..23: mol_type = other DNA
  modified_base 1: mod_base = OTHER; note = 2'-O-methyluridine-3'-phosphorothioate 5'-(E)-Vinylphosphonate
  modified_base 2: mod_base = OTHER; note = 2'-deoxyguanosine-3'-phosphorothioate
  modified_base 3: mod_base = OTHER; note = 2'-O-methylcytidine-3'-phosphate
  modified_base 4: mod_base = OTHER; note = 2'-O-methylcytidine-3'-phosphate
  modified_base 6: mod_base = OTHER; note = 2'-O-methylcytidine-3'-phosphate
  modified_base 7: mod_base = OTHER; note = cytidine-2'-phosphate
  modified_base 8: mod_base = OTHER; note = 2'-O-methylcytidine-3'-phosphate
  modified_base 9: mod_base = OTHER; note = 2'-O-methylguanosine-3'-phosphate
  modified_base 10: mod_base = OTHER; note = 2'-O-methylguanosine-3'-phosphate
  modified_base 11: mod_base = OTHER; note = 2'-O-methylguanosine-3'-phosphate
  modified_base 13: mod_base = OTHER; note = 2'-O-methylcytidine-3'-phosphate
  modified_base 14: mod_base = OTHER; note = 2'-deoxy-2'-fluoroguanosine-3'-phosphate
  modified_base 15: mod_base = OTHER; note = 2'-O-methyluridine-3'-phosphate
  modified_base 16: mod_base = OTHER; note = 2'-O-methylguanosine-3'-phosphate
  modified_base 17: mod_base = OTHER; note = 2'-O-methyluridine-3'-phosphate
  modified_base 18: mod_base = OTHER; note = 2'-O-methyluridine-3'-phosphate
  modified_base 19: mod_base = OTHER; note = 2'-O-methyluridine-3'-phosphate
  modified_base 20: mod_base = OTHER; note = 2'-O-methylguanosine-3'-phosphate
  modified_base 21: mod_base = OTHER; note = 2'-O-methyladenosine-3'-phosphorothioate
  modified_base 22: mod_base = OTHER; note = 2'-O-methyluridine-3'-phosphorothioate
  modified_base 23: mod_base = OTHER; note = 2'-O-methyladenosine
  misc_feature 1: note = RNA
  misc_feature 3..4: note = RNA
  misc_feature 6..11: note = RNA
  misc_feature 13..23: note = RNA
  misc_feature 2: note = DNA
  misc_feature 5: note = DNA
  misc_feature 12: note = DNA
tgcctcccgggacgtgtttgata

SEQ ID NO: 317 - DNA, 23 bp, synthetic construct
  source 1..23: mol_type = other DNA
  modified_base 1: mod_base = OTHER; note = 2'-O-methyluridine-3'-phosphorothioate 5'-(E)-Vinylphosphonate
  modified_base 2: mod_base = OTHER; note = 2'-deoxy-2'-fluoroguanosine-3'-phosphorothioate
  modified_base 3: mod_base = OTHER; note = 2'-O-methylcytidine-3'-phosphate
  modified_base 4: mod_base = OTHER; note = 2'-O-methylcytidine-3'-phosphate
  modified_base 6: mod_base = OTHER; note = 2'-O-methylcytidine-3'-phosphate
  modified_base 7: mod_base = OTHER; note = cytidine-2'-phosphate
  modified_base 8: mod_base = OTHER; note = 2'-O-methylcytidine-3'-phosphate
  modified_base 9: mod_base = OTHER; note = 2'-O-methylguanosine-3'-phosphate
  modified_base 10: mod_base = OTHER; note = 2'-O-methylguanosine-3'-phosphate
  modified_base 11: mod_base = OTHER; note = 2'-O-methylguanosine-3'-phosphate
  modified_base 12: mod_base = OTHER; note = 2'-O-methyladenosine-3'-phosphate
  modified_base 13: mod_base = OTHER; note = 2'-O-methylcytidine-3'-phosphate
  modified_base 14: mod_base = OTHER; note = 2'-deoxy-2'-fluoroguanosine-3'-phosphate
  modified_base 15: mod_base = OTHER; note = 2'-O-methyluridine-3'-phosphate
  modified_base 16: mod_base = OTHER; note = 2'-deoxy-2'-fluoroguanosine-3'-phosphate
  modified_base 17: mod_base = OTHER; note = 2'-O-methyluridine-3'-phosphate
  modified_base 18: mod_base = OTHER; note = 2'-O-methyluridine-3'-phosphate
  modified_base 19: mod_base = OTHER; note = 2'-O-methyluridine-3'-phosphate
  modified_base 20: mod_base = OTHER; note = 2'-O-methylguanosine-3'-phosphate
  modified_base 21: mod_base = OTHER; note = 2'-O-methyladenosine-3'-phosphorothioate
  modified_base 22: mod_base = OTHER; note = 2'-O-methyluridine-3'-phosphorothioate
  modified_base 23: mod_base = OTHER; note = 2'-O-methyladenosine
  misc_feature 1..4: note = RNA
  misc_feature 6..23: note = RNA
  misc_feature 5: note = DNA
tgcctcccgggacgtgtttgata

SEQ ID NO: 318 - DNA, 23 bp, synthetic construct
  source 1..23: mol_type = other DNA
  modified_base 1: mod_base = OTHER; note = 2'-O-methyluridine-3'-phosphorothioate 5'-(E)-Vinylphosphonate
  modified_base 2: mod_base = OTHER; note = 2'-deoxycytidine-3'-phosphorothioate
  modified_base 3: mod_base = OTHER; note = 2'-O-methylguanosine-3'-phosphate
  modified_base 4: mod_base = OTHER; note = 2'-O-methylcytidine-3'-phosphate
  modified_base 6: mod_base = OTHER; note = 2'-O-methyluridine-3'-phosphate
  modified_base 7: mod_base = OTHER; note = cytidine-2'-phosphate
  modified_base 8: mod_base = OTHER; note = 2'-O-methylcytidine-3'-phosphate
  modified_base 9: mod_base = OTHER; note = 2'-O-methylcytidine-3'-phosphate
  modified_base 10: mod_base = OTHER; note = 2'-O-methylguanosine-3'-phosphate
  modified_base 11: mod_base = OTHER; note = 2'-O-methylguanosine-3'-phosphate
  modified_base 13: mod_base = OTHER; note = 2'-O-methyladenosine-3'-phosphate
  modified_base 14: mod_base = OTHER; note = 2'-deoxy-2'-fluorocytidine-3'-phosphate
  modified_base 15: mod_base = OTHER; note = 2'-O-methylguanosine-3'-phosphate
  modified_base 16: mod_base = OTHER; note = 2'-O-methyluridine-3'-phosphate
  modified_base 17: mod_base = OTHER; note = 2'-O-methylguanosine-3'-phosphate
  modified_base 18: mod_base = OTHER; note = 2'-O-methyluridine-3'-phosphate
  modified_base 19: mod_base = OTHER; note = 2'-O-methyluridine-3'-phosphate
  modified_base 20: mod_base = OTHER; note = 2'-O-methyluridine-3'-phosphate
  modified_base 21: mod_base = OTHER; note = 2'-O-methylguanosine-3'-phosphorothioate
  modified_base 22: mod_base = OTHER; note = 2'-O-methyladenosine-3'-phosphorothioate
  modified_base 23: mod_base = OTHER; note = 2'-O-methyluridine
  misc_feature 1: note = RNA
  misc_feature 3..4: note = RNA
  misc_feature 6..11: note = RNA
  misc_feature 13..23: note = RNA
  misc_feature 2: note = DNA
  misc_feature 5: note = DNA
  misc_feature 12: note = DNA
tcgcctcccgggacgtgtttgat

SEQ ID NO: 319 - DNA, 23 bp, synthetic construct
  source 1..23: mol_type = other DNA
  modified_base 1: mod_base = OTHER; note = 2'-O-methyluridine-3'-phosphorothioate 5'-(E)-Vinylphosphonate
  modified_base 2: mod_base = OTHER; note = 2'-deoxy-2'-fluorocytidine-3'-phosphorothioate
  modified_base 3: mod_base = OTHER; note = 2'-O-methylguanosine-3'-phosphate
  modified_base 4: mod_base = OTHER; note = 2'-O-methylcytidine-3'-phosphate
  modified_base 6: mod_base = OTHER; note = 2'-O-methyluridine-3'-phosphate
  modified_base 7: mod_base = OTHER; note = cytidine-2'-phosphate
  modified_base 8: mod_base = OTHER; note = 2'-O-methylcytidine-3'-phosphate
  modified_base 9: mod_base = OTHER; note = 2'-O-methylcytidine-3'-phosphate
  modified_base 10: mod_base = OTHER; note = 2'-O-methylguanosine-3'-phosphate
  modified_base 11: mod_base = OTHER; note = 2'-O-methylguanosine-3'-phosphate
  modified_base 12: mod_base = OTHER; note = 2'-O-methylguanosine-3'-phosphate
  modified_base 13: mod_base = OTHER; note = 2'-O-methyladenosine-3'-phosphate
  modified_base 14: mod_base = OTHER; note = 2'-deoxy-2'-fluorocytidine-3'-phosphate
  modified_base 15: mod_base = OTHER; note = 2'-O-methylguanosine-3'-phosphate
  modified_base 16: mod_base = OTHER; note = 2'-deoxy-2'-fluorouridine-3'-phosphate
  modified_base 17: mod_base = OTHER; note = 2'-O-methylguanosine-3'-phosphate
  modified_base 18: mod_base = OTHER; note = 2'-O-methyluridine-3'-phosphate
  modified_base 19: mod_base = OTHER; note = 2'-O-methyluridine-3'-phosphate
  modified_base 20: mod_base = OTHER; note = 2'-O-methyluridine-3'-phosphate
  modified_base 21: mod_base = OTHER; note = 2'-O-methylguanosine-3'-phosphorothioate
  modified_base 22: mod_base = OTHER; note = 2'-O-methyladenosine-3'-phosphorothioate
  modified_base 23: mod_base = OTHER; note = 2'-O-methyluridine
  misc_feature 1..4: note = RNA
  misc_feature 6..23: note = RNA
  misc_feature 5: note = DNA
tcgcctcccgggacgtgtttgat

SEQ ID NO: 320 - DNA, 23 bp, synthetic construct
  source 1..23: mol_type = other DNA
  modified_base 1: mod_base = OTHER; note = 2'-O-methyluridine-3'-phosphorothioate 5'-(E)-Vinylphosphonate
  modified_base 2: mod_base = OTHER; note = 2'-deoxycytidine-3'-phosphorothioate
  modified_base 3: mod_base = OTHER; note = 2'-O-methylcytidine-3'-phosphate
  modified_base 4: mod_base = OTHER; note = 2'-O-methylguanosine-3'-phosphate
  modified_base 6: mod_base = OTHER; note = 2'-O-methylcytidine-3'-phosphate
  modified_base 7: mod_base = OTHER; note = Thymidine-glycol nucleic acid (GNA), S-Isomer
  modified_base 8: mod_base = OTHER; note = 2'-O-methylcytidine-3'-phosphate
  modified_base 9: mod_base = OTHER; note = 2'-O-methylcytidine-3'-phosphate
  modified_base 10: mod_base = OTHER; note = 2'-O-methylcytidine-3'-phosphate
  modified_base 11: mod_base = OTHER; note = 2'-O-methylguanosine-3'-phosphate
  modified_base 13: mod_base = OTHER; note = 2'-O-methylguanosine-3'-phosphate
  modified_base 14: mod_base = OTHER; note = 2'-deoxy-2'-fluoroadenosine-3'-phosphate
  modified_base 15: mod_base = OTHER; note = 2'-O-methylcytidine-3'-phosphate
  modified_base 16: mod_base = OTHER; note = 2'-O-methylguanosine-3'-phosphate
  modified_base 17: mod_base = OTHER; note = 2'-O-methyluridine-3'-phosphate
  modified_base 18: mod_base = OTHER; note = 2'-O-methylguanosine-3'-phosphate
  modified_base 19: mod_base = OTHER; note = 2'-O-methyluridine-3'-phosphate
  modified_base 20: mod_base = OTHER; note = 2'-O-methyluridine-3'-phosphate
  modified_base 21: mod_base = OTHER; note = 2'-O-methyluridine-3'-phosphorothioate
  modified_base 22: mod_base = OTHER; note = 2'-O-methylguanosine-3'-phosphorothioate
  modified_base 23: mod_base = OTHER; note = 2'-O-methyladenosine
  misc_feature 1: note = RNA
  misc_feature 3..4: note = RNA
  misc_feature 6..11: note = RNA
  misc_feature 13..23: note = RNA
  misc_feature 2: note = DNA
  misc_feature 5: note = DNA
  misc_feature 12: note = DNA
tccgcctcccgggacgtgtttga

SEQ ID NO: 321 - DNA, 23 bp, synthetic construct
  source 1..23: mol_type = other DNA
  modified_base 1: mod_base = OTHER; note = 2'-O-methyluridine-3'-phosphorothioate 5'-(E)-Vinylphosphonate
  modified_base 2: mod_base = OTHER; note = 2'-deoxy-2'-fluorocytidine-3'-phosphorothioate
  modified_base 3: mod_base = OTHER; note = 2'-O-methylcytidine-3'-phosphate
  modified_base 4: mod_base = OTHER; note = 2'-O-methylguanosine-3'-phosphate
  modified_base 6: mod_base = OTHER; note = 2'-O-methylcytidine-3'-phosphate
  modified_base 7: mod_base = OTHER; note = Thymidine-glycol nucleic acid (GNA), S-Isomer
  modified_base 8: mod_base = OTHER; note = 2'-O-methylcytidine-3'-phosphate
  modified_base 9: mod_base = OTHER; note = 2'-O-methylcytidine-3'-phosphate
  modified_base 10: mod_base = OTHER; note = 2'-O-methylcytidine-3'-phosphate
  modified_base 11: mod_base = OTHER; note = 2'-O-methylguanosine-3'-phosphate
  modified_base 12: mod_base = OTHER; note = 2'-O-methylguanosine-3'-phosphate
  modified_base 13: mod_base = OTHER; note = 2'-O-methylguanosine-3'-phosphate
  modified_base 14: mod_base = OTHER; note = 2'-deoxy-2'-fluoroadenosine-3'-phosphate
  modified_base 15: mod_base = OTHER; note = 2'-O-methylcytidine-3'-phosphate
  modified_base 16: mod_base = OTHER; note = 2'-deoxy-2'-fluoroguanosine-3'-phosphate
  modified_base 17: mod_base = OTHER; note = 2'-O-methyluridine-3'-phosphate
  modified_base 18: mod_base = OTHER; note = 2'-O-methylguanosine-3'-phosphate
  modified_base 19: mod_base = OTHER; note = 2'-O-methyluridine-3'-phosphate
  modified_base 20: mod_base = OTHER; note = 2'-O-methyluridine-3'-phosphate
  modified_base 21: mod_base = OTHER; note = 2'-O-methyluridine-3'-phosphorothioate
  modified_base 22: mod_base = OTHER; note = 2'-O-methylguanosine-3'-phosphorothioate
  modified_base 23: mod_base = OTHER; note = 2'-O-methyladenosine
  misc_feature 1..4: note = RNA
  misc_feature 6..23: note = RNA
  misc_feature 5: note = DNA
tccgcctcccgggacgtgtttga

SEQ ID NO: 322 - DNA, 23 bp, synthetic construct
  source 1..23: mol_type = other DNA
  modified_base 1: mod_base = OTHER; note = 2'-O-methyluridine-3'-phosphorothioate 5'-(E)-Vinylphosphonate
  modified_base 2: mod_base = OTHER; note = 2'-deoxyguanosine-3'-phosphorothioate
  modified_base 3: mod_base = OTHER; note = 2'-O-methylcytidine-3'-phosphate
  modified_base 4: mod_base = OTHER; note = 2'-O-methylcytidine-3'-phosphate
  modified_base 6: mod_base = OTHER; note = 2'-O-methylcytidine-3'-phosphate
  modified_base 7: mod_base = OTHER; note = cytidine-2'-phosphate
  modified_base 8: mod_base = OTHER; note = 2'-O-methyluridine-3'-phosphate
  modified_base 9: mod_base = OTHER; note = 2'-O-methylcytidine-3'-phosphate
  modified_base 10: mod_base = OTHER; note = 2'-O-methylcytidine-3'-phosphate
  modified_base 11: mod_base = OTHER; note = 2'-O-methylcytidine-3'-phosphate
  modified_base 13: mod_base = OTHER; note = 2'-O-methylguanosine-3'-phosphate
  modified_base 14: mod_base = OTHER; note = 2'-deoxy-2'-fluoroguanosine-3'-phosphate
  modified_base 15: mod_base = OTHER; note = 2'-O-methyladenosine-3'-phosphate
  modified_base 16: mod_base = OTHER; note = 2'-O-methylcytidine-3'-phosphate
  modified_base 17: mod_base = OTHER; note = 2'-O-methylguanosine-3'-phosphate
  modified_base 18: mod_base = OTHER; note = 2'-O-methyluridine-3'-phosphate
  modified_base 19: mod_base = OTHER; note = 2'-O-methylguanosine-3'-phosphate
  modified_base 20: mod_base = OTHER; note = 2'-O-methyluridine-3'-phosphate
  modified_base 21: mod_base = OTHER; note = 2'-O-methyluridine-3'-phosphorothioate
  modified_base 22: mod_base = OTHER; note = 2'-O-methyluridine-3'-phosphorothioate
  modified_base 23: mod_base = OTHER; note = 2'-O-methylguanosine
  misc_feature 1: note = RNA
  misc_feature 3..4: note = RNA
  misc_feature 6..11: note = RNA
  misc_feature 13..23: note = RNA
  misc_feature 2: note = DNA
  misc_feature 5: note = DNA
  misc_feature 12: note = DNA
tgccgcctcccgggacgtgtttg

SEQ ID NO: 323 - DNA, 23 bp, synthetic construct
  source 1..23: mol_type = other DNA
  modified_base 1: mod_base = OTHER; note = 2'-O-methyluridine-3'-phosphorothioate 5'-(E)-Vinylphosphonate
  modified_base 2: mod_base = OTHER; note = 2'-deoxy-2'-fluoroguanosine-3'-phosphorothioate
  modified_base 3: mod_base = OTHER; note = 2'-O-methylcytidine-3'-phosphate
  modified_base 4: mod_base = OTHER; note = 2'-O-methylcytidine-3'-phosphate
  modified_base 6: mod_base = OTHER; note = 2'-O-methylcytidine-3'-phosphate
  modified_base 7: mod_base = OTHER; note = cytidine-2'-phosphate
  modified_base 8: mod_base = OTHER; note = 2'-O-methyluridine-3'-phosphate
  modified_base 9: mod_base = OTHER; note = 2'-O-methylcytidine-3'-phosphate
  modified_base 10: mod_base = OTHER; note = 2'-O-methylcytidine-3'-phosphate
  modified_base 11: mod_base = OTHER; note = 2'-O-methylcytidine-3'-phosphate
  modified_base 12: mod_base = OTHER; note = 2'-O-methylguanosine-3'-phosphate
  modified_base 13: mod_base = OTHER; note = 2'-O-methylguanosine-3'-phosphate
  modified_base 14: mod_base = OTHER; note = 2'-deoxy-2'-fluoroguanosine-3'-phosphate
  modified_base 15: mod_base = OTHER; note = 2'-O-methyladenosine-3'-phosphate
  modified_base 16: mod_base = OTHER; note = 2'-deoxy-2'-fluorocytidine-3'-phosphate
  modified_base 17: mod_base = OTHER; note = 2'-O-methylguanosine-3'-phosphate
  modified_base 18: mod_base = OTHER; note = 2'-O-methyluridine-3'-phosphate
  modified_base 19: mod_base = OTHER; note = 2'-O-methylguanosine-3'-phosphate
  modified_base 20: mod_base = OTHER; note = 2'-O-methyluridine-3'-phosphate
  modified_base 21: mod_base = OTHER; note = 2'-O-methyluridine-3'-phosphorothioate
  modified_base 22: mod_base = OTHER; note = 2'-O-methyluridine-3'-phosphorothioate
  modified_base 23: mod_base = OTHER; note = 2'-O-methylguanosine
  misc_feature 1..4: note = RNA
  misc_feature 6..23: note = RNA
  misc_feature 5: note = DNA
tgccgcctcccgggacgtgtttg

SEQ ID NO: 324 - DNA, 23 bp, synthetic construct
  source 1..23: mol_type = other DNA
  modified_base 1: mod_base = OTHER; note = 2'-O-methyluridine-3'-phosphorothioate 5'-(E)-Vinylphosphonate
  modified_base 2: mod_base = OTHER; note = 2'-deoxy-2'-fluorouridine-3'-phosphorothioate
  modified_base 3: mod_base = OTHER; note = 2'-O-methylguanosine-3'-phosphate
  modified_base 4: mod_base = OTHER; note = 2'-O-methylcytidine-3'-phosphate
  modified_base 6: mod_base = OTHER; note = 2'-O-methylguanosine-3'-phosphate
  modified_base 7: mod_base = OTHER; note = cytidine-2'-phosphate
  modified_base 8: mod_base = OTHER; note = 2'-O-methylcytidine-3'-phosphate
  modified_base 9: mod_base = OTHER; note = 2'-O-methyluridine-3'-phosphate
  modified_base 10: mod_base = OTHER; note = 2'-O-methylcytidine-3'-phosphate
  modified_base 11: mod_base = OTHER; note = 2'-O-methylcytidine-3'-phosphate
  modified_base 12: mod_base = OTHER; note = 2'-O-methylcytidine-3'-phosphate
  modified_base 13: mod_base = OTHER; note = 2'-O-methylguanosine-3'-phosphate
  modified_base 14: mod_base = OTHER; note = 2'-deoxy-2'-fluoroguanosine-3'-phosphate
  modified_base 15: mod_base = OTHER; note = 2'-O-methylguanosine-3'-phosphate
  modified_base 16: mod_base = OTHER; note = 2'-deoxy-2'-fluoroadenosine-3'-phosphate
  modified_base 17: mod_base = OTHER; note = 2'-O-methylcytidine-3'-phosphate
  modified_base 18: mod_base = OTHER; note = 2'-O-methylguanosine-3'-phosphate
  modified_base 19: mod_base = OTHER; note = 2'-O-methyluridine-3'-phosphate
  modified_base 20: mod_base = OTHER; note = 2'-O-methylguanosine-3'-phosphate
  modified_base 21: mod_base = OTHER; note = 2'-O-methyluridine-3'-phosphorothioate
  modified_base 22: mod_base = OTHER; note = 2'-O-methyluridine-3'-phosphorothioate
  modified_base 23: mod_base = OTHER; note = 2'-O-methyluridine
  misc_feature 1..4: note = RNA
  misc_feature 6..23: note = RNA
  misc_feature 5: note = DNA
ttgccgcctcccgggacgtgttt

SEQ ID NO: 325 - DNA, 23 bp, synthetic construct
  source 1..23: mol_type = other DNA
  modified_base 1: mod_base = OTHER; note = 2'-O-methyluridine-3'-phosphorothioate 5'-(E)-Vinylphosphonate
  modified_base 2: mod_base = OTHER; note = 2'-deoxycytidine-3'-phosphorothioate
  modified_base 3: mod_base = OTHER; note = 2'-O-methyluridine-3'-phosphate
  modified_base 4: mod_base = OTHER; note = 2'-O-methylguanosine-3'-phosphate
  modified_base 6: mod_base = OTHER; note = 2'-O-methylcytidine-3'-phosphate
  modified_base 8: mod_base = OTHER; note = 2'-O-methylcytidine-3'-phosphate
  modified_base 9: mod_base = OTHER; note = 2'-O-methylcytidine-3'-phosphate
  modified_base 10: mod_base = OTHER; note = 2'-O-methyluridine-3'-phosphate
  modified_base 11: mod_base = OTHER; note = 2'-O-methylcytidine-3'-phosphate
  modified_base 13: mod_base = OTHER; note = 2'-O-methylcytidine-3'-phosphate
  modified_base 14: mod_base = OTHER; note = 2'-deoxy-2'-fluoroguanosine-3'-phosphate
  modified_base 15: mod_base = OTHER; note = 2'-O-methylguanosine-3'-phosphate
  modified_base 16: mod_base = OTHER; note = 2'-O-methylguanosine-3'-phosphate
  modified_base 17: mod_base = OTHER; note = 2'-O-methyladenosine-3'-phosphate
  modified_base 18: mod_base = OTHER; note = 2'-O-methylcytidine-3'-phosphate
  modified_base 19: mod_base = OTHER; note = 2'-O-methylguanosine-3'-phosphate
  modified_base 20: mod_base = OTHER; note = 2'-O-methyluridine-3'-phosphate
  modified_base 21: mod_base = OTHER; note = 2'-O-methylguanosine-3'-phosphorothioate
  modified_base 22: mod_base = OTHER; note = 2'-O-methyluridine-3'-phosphorothioate
  modified_base 23: mod_base = OTHER; note = 2'-O-methyluridine
  misc_feature 1: note = RNA
  misc_feature 3..4: note = RNA
  misc_feature 6: note = RNA
  misc_feature 8..11: note = RNA
  misc_feature 13..23: note = RNA
  misc_feature 2: note = DNA
  misc_feature 5: note = DNA
  misc_feature 7: note = DNA
  misc_feature 12: note = DNA
tctgccgcctcccgggacgtgtt

SEQ ID NO: 326 - RNA, 23 nt, synthetic construct
  source 1..23: mol_type = other RNA
gtgcagataattaataagaagct

SEQ ID NO: 327 - RNA, 23 nt, synthetic construct
  source 1..23: mol_type = other RNA
tgcagataattaataagaagctg

SEQ ID NO: 328 - RNA, 23 nt, synthetic construct
  source 1..23: mol_type = other RNA
gcagataattaataagaagctgg

SEQ ID NO: 329 - RNA, 23 nt, synthetic construct
  source 1..23: mol_type = other RNA
cagataattaataagaagctgga

SEQ ID NO: 330 - RNA, 23 nt, synthetic construct
  source 1..23: mol_type = other RNA
agataattaataagaagctggat

SEQ ID NO: 331 - RNA, 23 nt, synthetic construct
  source 1..23: mol_type = other RNA
gataattaataagaagctggatc

SEQ ID NO: 332 - RNA, 23 nt, synthetic construct
  source 1..23: mol_type = other RNA
ataattaataagaagctggatct

SEQ ID NO: 333 - RNA, 23 nt, synthetic construct
  source 1..23: mol_type = other RNA
taattaataagaagctggatctt

SEQ ID NO: 334 - RNA, 23 nt, synthetic construct
  source 1..23: mol_type = other RNA
aattaataagaagctggatctta

SEQ ID NO: 335 - RNA, 23 nt, synthetic construct
  source 1..23: mol_type = other RNA
attaataagaagctggatcttag

SEQ ID NO: 336 - RNA, 23 nt, synthetic construct
  source 1..23: mol_type = other RNA
ttaataagaagctggatcttagc

SEQ ID NO: 337 - RNA, 23 nt, synthetic construct
  source 1..23: mol_type = other RNA
taataagaagctggatcttagca

SEQ ID NO: 338 - RNA, 23 nt, synthetic construct
  source 1..23: mol_type = other RNA
aataagaagctggatcttagcaa

SEQ ID NO: 339 - RNA, 23 nt, synthetic construct
  source 1..23: mol_type = other RNA
ataagaagctggatcttagcaac

SEQ ID NO: 340 - RNA, 23 nt, synthetic construct
  source 1..23: mol_type = other RNA
taagaagctggatcttagcaacg

SEQ ID NO: 341 - RNA, 23 nt, synthetic construct
  source 1..23: mol_type = other RNA
aagaagctggatcttagcaacgt

SEQ ID NO: 342 - RNA, 23 nt, synthetic construct
  source 1..23: mol_type = other RNA
agaagctggatcttagcaacgtc

SEQ ID NO: 343 - RNA, 23 nt, synthetic construct
  source 1..23: mol_type = other RNA
gaagctggatcttagcaacgtcc

SEQ ID NO: 344 - RNA, 23 nt, synthetic construct
  source 1..23: mol_type = other RNA
aagctggatcttagcaacgtcca

SEQ ID NO: 345 - RNA, 23 nt, synthetic construct
  source 1..23: mol_type = other RNA
agctggatcttagcaacgtccag

SEQ ID NO: 346 - RNA, 23 nt, synthetic construct
  source 1..23: mol_type = other RNA
gctggatcttagcaacgtccagt

SEQ ID NO: 347 - RNA, 23 nt, synthetic construct
  source 1..23: mol_type = other RNA
ctggatcttagcaacgtccagtc

SEQ ID NO: 348 - RNA, 23 nt, synthetic construct
  source 1..23: mol_type = other RNA
tggatcttagcaacgtccagtcc

SEQ ID NO: 349 - RNA, 23 nt, synthetic construct
  source 1..23: mol_type = other RNA
ggatcttagcaacgtccagtcca

SEQ ID NO: 350 - RNA, 23 nt, synthetic construct
  source 1..23: mol_type = other RNA
gatcttagcaacgtccagtccaa

SEQ ID NO: 351 - RNA, 23 nt, synthetic construct
  source 1..23: mol_type = other RNA
atcttagcaacgtccagtccaag

SEQ ID NO: 352 - RNA, 23 nt, synthetic construct
  source 1..23: mol_type = other RNA
tcttagcaacgtccagtccaagt

SEQ ID NO: 353 - RNA, 23 nt, synthetic construct
  source 1..23: mol_type = other RNA
cttagcaacgtccagtccaagtg

SEQ ID NO: 354 - RNA, 23 nt, synthetic construct
  source 1..23: mol_type = other RNA
ttagcaacgtccagtccaagtgt

SEQ ID NO: 355 - RNA, 23 nt, synthetic construct
  source 1..23: mol_type = other RNA
tagcaacgtccagtccaagtgtg

SEQ ID NO: 356 - RNA, 23 nt, synthetic construct
  source 1..23: mol_type = other RNA
agcaacgtccagtccaagtgtgg

SEQ ID NO: 357 - RNA, 23 nt, synthetic construct
  source 1..23: mol_type = other RNA
gcaacgtccagtccaagtgtggc

SEQ ID NO: 358 - RNA, 23 nt, synthetic construct
  source 1..23: mol_type = other RNA
caacgtccagtccaagtgtggct

SEQ ID NO: 359 - RNA, 23 nt, synthetic construct
  source 1..23: mol_type = other RNA
aacgtccagtccaagtgtggctc

SEQ ID NO: 360 - RNA, 23 nt, synthetic construct
  source 1..23: mol_type = other RNA
acgtccagtccaagtgtggctca

SEQ ID NO: 361 - RNA, 23 nt, synthetic construct
  source 1..23: mol_type = other RNA
cgtccagtccaagtgtggctcaa

SEQ ID NO: 362 - RNA, 23 nt, synthetic construct
  source 1..23: mol_type = other RNA
gtccagtccaagtgtggctcaaa

SEQ ID NO: 363 - RNA, 23 nt, synthetic construct
  source 1..23: mol_type = other RNA
tccagtccaagtgtggctcaaag

SEQ ID NO: 364 - RNA, 23 nt, synthetic construct
  source 1..23: mol_type = other RNA
ccagtccaagtgtggctcaaagg

SEQ ID NO: 365 - RNA, 23 nt, synthetic construct
  source 1..23: mol_type = other RNA
cagtccaagtgtggctcaaagga

SEQ ID NO: 366 - RNA, 23 nt, synthetic construct
  source 1..23: mol_type = other RNA
agtccaagtgtggctcaaaggat

SEQ ID NO: 367 - RNA, 23 nt, synthetic construct
  source 1..23: mol_type = other RNA
gtccaagtgtggctcaaaggata

SEQ ID NO: 368 - RNA, 23 nt, synthetic construct
  source 1..23: mol_type = other RNA
tccaagtgtggctcaaaggataa

SEQ ID NO: 369 - RNA, 23 nt, synthetic construct
  source 1..23: mol_type = other RNA
ccaagtgtggctcaaaggataat

SEQ ID NO: 370 - RNA, 23 nt, synthetic construct
  source 1..23: mol_type = other RNA
caagtgtggctcaaaggataata

SEQ ID NO: 371 - RNA, 23 nt, synthetic construct
  source 1..23: mol_type = other RNA
aagtgtggctcaaaggataatat

SEQ ID NO: 372 - RNA, 23 nt, synthetic construct
  source 1..23: mol_type = other RNA
agtgtggctcaaaggataatatc

SEQ ID NO: 373 - RNA, 23 nt, synthetic construct
  source 1..23: mol_type = other RNA
gtgtggctcaaaggataatatca

SEQ ID NO: 374 - RNA, 23 nt, synthetic construct
  source 1..23: mol_type = other RNA
tgtggctcaaaggataatatcaa

SEQ ID NO: 375 - RNA, 23 nt, synthetic construct
  source 1..23: mol_type = other RNA
gtggctcaaaggataatatcaaa

SEQ ID NO: 376 - RNA, 23 nt, synthetic construct
  source 1..23: mol_type = other RNA
tggctcaaaggataatatcaaac

SEQ ID NO: 377 - RNA, 23 nt, synthetic construct
  source 1..23: mol_type = other RNA
ggctcaaaggataatatcaaaca

SEQ ID NO: 378 - RNA, 23 nt, synthetic construct
  source 1..23: mol_type = other RNA
gctcaaaggataatatcaaacac

SEQ ID NO: 379 - RNA, 23 nt, synthetic construct
  source 1..23: mol_type = other RNA
ctcaaaggataatatcaaacacg

SEQ ID NO: 380 - RNA, 23 nt, synthetic construct
  source 1..23: mol_type = other RNA
tcaaaggataatatcaaacacgt

SEQ ID NO: 381 - RNA, 23 nt, synthetic construct
  source 1..23: mol_type = other RNA
caaaggataatatcaaacacgtc

SEQ ID NO: 382 - RNA, 23 nt, synthetic construct
  source 1..23: mol_type = other RNA
aaaggataatatcaaacacgtcc

SEQ ID NO: 383 - RNA, 23 nt, synthetic construct
  source 1..23: mol_type = other RNA
aaggataatatcaaacacgtccc

SEQ ID NO: 384 - RNA, 23 nt, synthetic construct
  source 1..23: mol_type = other RNA
aggataatatcaaacacgtcccg

SEQ ID NO: 385 - RNA, 23 nt, synthetic construct
  source 1..23: mol_type = other RNA
ggataatatcaaacacgtcccgg

SEQ ID NO: 386 - RNA, 23 nt, synthetic construct
  source 1..23: mol_type = other RNA
gataatatcaaacacgtcccggg

SEQ ID NO: 387 - RNA, 23 nt, synthetic construct
  source 1..23: mol_type = other RNA
gataatatcaaacacgtcccggg

SEQ ID NO: 388 - RNA, 23 nt, synthetic construct
  source 1..23: mol_type = other RNA
ataatatcaaacacgtcccggga

SEQ ID NO: 389 - RNA, 23 nt, synthetic construct
  source 1..23: mol_type = other RNA
taatatcaaacacgtcccgggag

SEQ ID NO: 390 - RNA, 23 nt, synthetic construct
  source 1..23: mol_type = other RNA
taatatcaaacacgtcccgggag

SEQ ID NO: 391 - RNA, 23 nt, synthetic construct
  source 1..23: mol_type = other RNA
aatatcaaacacgtcccgggagg

SEQ ID NO: 392 - RNA, 23 nt, synthetic construct
  source 1..23: mol_type = other RNA
atatcaaacacgtcccgggaggc

SEQ ID NO: 393 - RNA, 23 nt, synthetic construct
  source 1..23: mol_type = other RNA
tatcaaacacgtcccgggaggcg

SEQ ID NO: 394 - RNA, 23 nt, synthetic construct
  source 1..23: mol_type = other RNA
tatcaaacacgtcccgggaggcg

SEQ ID NO: 395 - RNA, 23 nt, synthetic construct
  source 1..23: mol_type = other RNA
atcaaacacgtcccgggaggcgg

SEQ ID NO: 396 - RNA, 23 nt, synthetic construct
  source 1..23: mol_type = other RNA
atcaaacacgtcccgggaggcgg

SEQ ID NO: 397 - RNA, 23 nt, synthetic construct
  source 1..23: mol_type = other RNA
tcaaacacgtcccgggaggcggc

SEQ ID NO: 398 - RNA, 23 nt, synthetic construct
  source 1..23: mol_type = other RNA
tcaaacacgtcccgggaggcggc

SEQ ID NO: 399 - RNA, 23 nt, synthetic construct
  source 1..23: mol_type = other RNA
caaacacgtcccgggaggcggca

SEQ ID NO: 400 - RNA, 23 nt, synthetic construct
  source 1..23: mol_type = other RNA
caaacacgtcccgggaggcggca

SEQ ID NO: 401 - RNA, 23 nt, synthetic construct
  source 1..23: mol_type = other RNA
aaacacgtcccgggaggcggcag

SEQ ID NO: 402 - RNA, 23 nt, synthetic construct
  source 1..23: mol_type = other RNA
aacacgtcccgggaggcggcagt

SEQ ID NO: 403 - RNA, 21 nt, synthetic construct
  source 1..21: mol_type = other RNA
  modified_base 1: mod_base = OTHER; note = 2'-O-methyluridine-3'-phosphorothioate
  modified_base 2: mod_base = OTHER; note = 2'-O-methyladenosine-3'-phosphorothioate
  modified_base 3: mod_base = OTHER; note = 2'-O-methyladenosine-3'-phosphate
  modified_base 4: mod_base = OTHER; note = 2'-O-methyluridine-3'-phosphate
  modified_base 5: mod_base = OTHER; note = 2'-O-methyladenosine-3'-phosphate
  modified_base 6: mod_base = OTHER; note = 2'-O-hexadecyl-uridine-3'-phosphate
  modified_base 7: mod_base = OTHER; note = 2'-O-methylcytidine-3'-phosphate
  modified_base 8: mod_base = OTHER; note = 2'-O-methyladenosine-3'-phosphate
  modified_base 9: mod_base = OTHER; note = 2'-deoxy-2'-fluoroadenosine-3'-phosphate
  modified_base 10: mod_base = OTHER; note = 2'-deoxy-2'-fluoroadenosine-3'-phosphate
  modified_base 11: mod_base = OTHER; note = 2'-deoxy-2'-fluorocytidine-3'-phosphate
  modified_base 12: mod_base = OTHER; note = 2'-O-methyladenosine-3'-phosphate
  modified_base 13: mod_base = OTHER; note = 2'-O-methylcytidine-3'-phosphate
  modified_base 14: mod_base = OTHER; note = 2'-O-methylguanosine-3'-phosphate
  modified_base 15: mod_base = OTHER; note = 2'-O-methyluridine-3'-phosphate
  modified_base 16: mod_base = OTHER; note = 2'-O-methylcytidine-3'-phosphate
  modified_base 17: mod_base = OTHER; note = 2'-O-methylcytidine-3'-phosphate
  modified_base 18: mod_base = OTHER; note = 2'-O-methylcytidine-3'-phosphate
  modified_base 19: mod_base = OTHER; note = 2'-O-methylguanosine-3'-phosphorothioate
  modified_base 20: mod_base = OTHER; note = 2'-O-methylguanosine-3'-phosphorothioate
  modified_base 21: mod_base = OTHER; note = 2'-O-methyladenosine
taatatcaaacacgtcccgga

SEQ ID NO: 404 - RNA, 21 nt, synthetic construct
  source 1..21: mol_type = other RNA
  modified_base 1: mod_base = OTHER; note = 2'-O-methyladenosine-3'-phosphorothioate
  modified_base 2: mod_base = OTHER; note = 2'-O-methyluridine-3'-phosphorothioate
  modified_base 3: mod_base = OTHER; note = 2'-O-methyladenosine-3'-phosphate
  modified_base 4: mod_base = OTHER; note = 2'-O-methyluridine-3'-phosphate
  modified_base 5: mod_base = OTHER; note = 2'-O-methylcytidine-3'-phosphate
  modified_base 6: mod_base = OTHER; note = 2'-O-hexadecyl-adenosine-3'-phosphate
  modified_base 7: mod_base = OTHER; note = 2'-O-methyladenosine-3'-phosphate
  modified_base 8: mod_base = OTHER; note = 2'-O-methyladenosine-3'-phosphate
  modified_base 9: mod_base = OTHER; note = 2'-deoxy-2'-fluorocytidine-3'-phosphate
  modified_base 10: mod_base = OTHER; note = 2'-deoxy-2'-fluoroadenosine-3'-phosphate
  modified_base 11: mod_base = OTHER; note = 2'-deoxy-2'-fluorocytidine-3'-phosphate
  modified_base 12: mod_base = OTHER; note = 2'-O-methylguanosine-3'-phosphate
  modified_base 13: mod_base = OTHER; note = 2'-O-methyluridine-3'-phosphate
  modified_base 14: mod_base = OTHER; note = 2'-O-methylcytidine-3'-phosphate
  modified_base 15: mod_base = OTHER; note = 2'-O-methylcytidine-3'-phosphate
  modified_base 16: mod_base = OTHER; note = 2'-O-methylcytidine-3'-phosphate
  modified_base 17: mod_base = OTHER; note = 2'-O-methylguanosine-3'-phosphate
  modified_base 18: mod_base = OTHER; note = 2'-O-methylguanosine-3'-phosphate
  modified_base 19: mod_base = OTHER; note = 2'-O-methylguanosine-3'-phosphorothioate
  modified_base 20: mod_base = OTHER; note = 2'-O-methyladenosine-3'-phosphorothioate
  modified_base 21: mod_base = OTHER; note = 2'-O-methyladenosine
atatcaaacacgtcccgggaa

SEQ ID NO: 405 - RNA, 21 nt, synthetic construct
  source 1..21: mol_type = other RNA
  modified_base 1: mod_base = OTHER; note = 2'-O-methyluridine-3'-phosphorothioate
  modified_base 2: mod_base = OTHER; note = 2'-O-methylcytidine-3'-phosphorothioate
  modified_base 3: mod_base = OTHER; note = 2'-O-methyladenosine-3'-phosphate
  modified_base 4: mod_base = OTHER; note = 2'-O-methyladenosine-3'-phosphate
  modified_base 5: mod_base = OTHER; note = 2'-O-methyladenosine-3'-phosphate
  modified_base 6: mod_base = OTHER; note = 2'-O-hexadecyl-cytidine-3'-phosphate
  modified_base 7: mod_base = OTHER; note = 2'-O-methyladenosine-3'-phosphate
  modified_base 8: mod_base = OTHER; note = 2'-O-methylcytidine-3'-phosphate
  modified_base 9: mod_base = OTHER; note = 2'-deoxy-2'-fluoroguanosine-3'-phosphate
  modified_base 10: mod_base = OTHER; note = 2'-deoxy-2'-fluorouridine-3'-phosphate
  modified_base 11: mod_base = OTHER; note = 2'-deoxy-2'-fluorocytidine-3'-phosphate
  modified_base 12: mod_base = OTHER; note = 2'-O-methylcytidine-3'-phosphate
  modified_base 13: mod_base = OTHER; note = 2'-O-methylcytidine-3'-phosphate
  modified_base 14: mod_base = OTHER; note = 2'-O-methylguanosine-3'-phosphate
  modified_base 15: mod_base = OTHER; note = 2'-O-methylguanosine-3'-phosphate
  modified_base 16: mod_base = OTHER; note = 2'-O-methylguanosine-3'-phosphate
  modified_base 17: mod_base = OTHER; note = 2'-O-methyladenosine-3'-phosphate
  modified_base 18: mod_base = OTHER; note = 2'-O-methylguanosine-3'-phosphate
  modified_base 19: mod_base = OTHER; note = 2'-O-methylguanosine-3'-phosphorothioate
  modified_base 20: mod_base = OTHER; note = 2'-O-methylcytidine-3'-phosphorothioate
  modified_base 21: mod_base = OTHER; note = 2'-O-methyladenosine
tcaaacacgtcccgggaggca

SEQ ID NO: 406 - RNA, 21 nt, synthetic construct
  source 1..21: mol_type = other RNA
  modified_base 1: mod_base = OTHER; note = 2'-O-methylcytidine-3'-phosphorothioate
  modified_base 2: mod_base = OTHER; note = 2'-O-methyladenosine-3'-phosphorothioate
  modified_base 3: mod_base = OTHER; note = 2'-O-methyladenosine-3'-phosphate
  modified_base 4: mod_base = OTHER; note = 2'-O-methyladenosine-3'-phosphate
  modified_base 5: mod_base = OTHER; note = 2'-O-methylcytidine-3'-phosphate
  modified_base 6: mod_base = OTHER; note = 2'-O-hexadecyl-adenosine-3'-phosphate
  modified_base 7: mod_base = OTHER; note = 2'-O-methylcytidine-3'-phosphate
  modified_base 8: mod_base = OTHER; note = 2'-O-methylguanosine-3'-phosphate
  modified_base 9: mod_base = OTHER; note = 2'-deoxy-2'-fluorouridine-3'-phosphate
  modified_base 10: mod_base = OTHER; note = 2'-deoxy-2'-fluorocytidine-3'-phosphate
  modified_base 11: mod_base = OTHER; note = 2'-deoxy-2'-fluorocytidine-3'-phosphate
  modified_base 12: mod_base = OTHER; note = 2'-O-methylcytidine-3'-phosphate
  modified_base 13: mod_base = OTHER; note = 2'-O-methylguanosine-3'-phosphate
  modified_base 14: mod_base = OTHER; note = 2'-O-methylguanosine-3'-phosphate
  modified_base 15: mod_base = OTHER; note = 2'-O-methylguanosine-3'-phosphate
  modified_base 16: mod_base = OTHER; note = 2'-O-methyladenosine-3'-phosphate
  modified_base 17: mod_base = OTHER; note = 2'-O-methylguanosine-3'-phosphate
  modified_base 18: mod_base = OTHER; note = 2'-O-methylguanosine-3'-phosphate
  modified_base 19: mod_base = OTHER; note = 2'-O-methylcytidine-3'-phosphorothioate
  modified_base 20: mod_base = OTHER; note = 2'-O-methylguanosine-3'-phosphorothioate
  modified_base 21: mod_base = OTHER; note = 2'-O-methyladenosine
caaacacgtcccgggaggcga

SEQ ID NO: 407 - RNA, 21 nt, synthetic construct
  source 1..21: mol_type = other RNA
  modified_base 1: mod_base = OTHER; note = 2'-O-methyladenosine-3'-phosphorothioate
  modified_base 2: mod_base = OTHER; note = 2'-O-methyladenosine-3'-phosphorothioate
  modified_base 3: mod_base = OTHER; note = 2'-O-methyladenosine-3'-phosphate
  modified_base 4: mod_base = OTHER; note = 2'-O-methylcytidine-3'-phosphate
  modified_base 5: mod_base = OTHER; note = 2'-O-methyladenosine-3'-phosphate
  modified_base 6: mod_base = OTHER; note = 2'-O-hexadecyl-cytidine-3'-phosphate
  modified_base 7: mod_base = OTHER; note = 2'-O-methylguanosine-3'-phosphate
  modified_base 8: mod_base = OTHER; note = 2'-O-methyluridine-3'-phosphate
  modified_base 9: mod_base = OTHER; note = 2'-deoxy-2'-fluorocytidine-3'-phosphate
  modified_base 10: mod_base = OTHER; note = 2'-deoxy-2'-fluorocytidine-3'-phosphate
  modified_base 11: mod_base = OTHER; note = 2'-deoxy-2'-fluorocytidine-3'-phosphate
  modified_base 12: mod_base = OTHER; note = 2'-O-methylguanosine-3'-phosphate
  modified_base 13: mod_base = OTHER; note = 2'-O-methylguanosine-3'-phosphate
  modified_base 14: mod_base = OTHER; note = 2'-O-methylguanosine-3'-phosphate
  modified_base 15: mod_base = OTHER; note = 2'-O-methyladenosine-3'-phosphate
  modified_base 16: mod_base = OTHER; note = 2'-O-methylguanosine-3'-phosphate
  modified_base 17: mod_base = OTHER; note = 2'-O-methylguanosine-3'-phosphate
  modified_base 18: mod_base = OTHER; note = 2'-O-methylcytidine-3'-phosphate
  modified_base 19: mod_base = OTHER; note = 2'-O-methylguanosine-3'-phosphorothioate
  modified_base 20: mod_base = OTHER; note = 2'-O-methylguanosine-3'-phosphorothioate
  modified_base 21: mod_base = OTHER; note = 2'-O-methyladenosine
aaacacgtcccgggaggcgga

SEQ ID NO: 408 - RNA, 21 nt, synthetic construct
  source 1..21: mol_type = other RNA
  modified_base 1: mod_base = OTHER; note = 2'-O-methyladenosine-3'-phosphorothioate
  modified_base 2: mod_base = OTHER; note = 2'-O-methyladenosine-3'-phosphorothioate
  modified_base 3: mod_base = OTHER; note = 2'-O-methylcytidine-3'-phosphate
  modified_base 4: mod_base = OTHER; note = 2'-O-methyladenosine-3'-phosphate
  modified_base 5: mod_base = OTHER; note = 2'-O-methylcytidine-3'-phosphate
  modified_base 6: mod_base = OTHER; note = 2'-O-hexadecyl-guanosine-3'-phosphate
  modified_base 7: mod_base = OTHER; note = 2'-O-methyluridine-3'-phosphate
  modified_base 8: mod_base = OTHER; note = 2'-O-methylcytidine-3'-phosphate
  modified_base 9: mod_base = OTHER; note = 2'-deoxy-2'-fluorocytidine-3'-phosphate
  modified_base 10: mod_base = OTHER; note = 2'-deoxy-2'-fluorocytidine-3'-phosphate
  modified_base 11: mod_base = OTHER; note = 2'-deoxy-2'-fluoroguanosine-3'-phosphate
  modified_base 12: mod_base = OTHER; note = 2'-O-methylguanosine-3'-phosphate
  modified_base 13: mod_base = OTHER; note = 2'-O-methylguanosine-3'-phosphate
  modified_base 14: mod_base = OTHER; note = 2'-O-methyladenosine-3'-phosphate
  modified_base 15: mod_base = OTHER; note = 2'-O-methylguanosine-3'-phosphate
  modified_base 16: mod_base = OTHER; note = 2'-O-methylguanosine-3'-phosphate
  modified_base 17: mod_base = OTHER; note = 2'-O-methylcytidine-3'-phosphate
  modified_base 18: mod_base = OTHER; note = 2'-O-methylguanosine-3'-phosphate
  modified_base 19: mod_base = OTHER; note = 2'-O-methylguanosine-3'-phosphorothioate
  modified_base 20: mod_base = OTHER; note = 2'-O-methylcytidine-3'-phosphorothioate
  modified_base 21: mod_base = OTHER; note = 2'-O-methyladenosine
aacacgtcccgggaggcggca

SEQ ID NO: 409 - RNA, 21 nt, synthetic construct
  source 1..21: mol_type = other RNA
  modified_base 1: mod_base = OTHER; note = 2'-O-methyladenosine-3'-phosphorothioate
  modified_base 2: mod_base = OTHER; note = 2'-O-methylcytidine-3'-phosphorothioate
  modified_base 3: mod_base = OTHER; note = 2'-O-methyladenosine-3'-phosphate
  modified_base 4: mod_base = OTHER; note = 2'-O-methylcytidine-3'-phosphate
  modified_base 5: mod_base = OTHER; note = 2'-O-methylguanosine-3'-phosphate
  modified_base 6: mod_base = OTHER; note = 2'-O-hexadecyl-uridine-3'-phosphate
  modified_base 7: mod_base = OTHER; note = 2'-O-methylcytidine-3'-phosphate
  modified_base 8: mod_base = OTHER; note = 2'-O-methylcytidine-3'-phosphate
  modified_base 9: mod_base = OTHER; note = 2'-deoxy-2'-fluorocytidine-3'-phosphate
  modified_base 10: mod_base = OTHER; note = 2'-deoxy-2'-fluoroguanosine-3'-phosphate
  modified_base 11: mod_base = OTHER; note = 2'-deoxy-2'-fluoroguanosine-3'-phosphate
  modified_base 12: mod_base = OTHER; note = 2'-O-methylguanosine-3'-phosphate
  modified_base 13: mod_base = OTHER; note = 2'-O-methyladenosine-3'-phosphate
  modified_base 14: mod_base = OTHER; note = 2'-O-methylguanosine-3'-phosphate
  modified_base 15: mod_base = OTHER; note = 2'-O-methylguanosine-3'-phosphate
  modified_base 16: mod_base = OTHER; note = 2'-O-methylcytidine-3'-phosphate
  modified_base 17: mod_base = OTHER; note = 2'-O-methylguanosine-3'-phosphate
  modified_base 18: mod_base = OTHER; note = 2'-O-methylguanosine-3'-phosphate
  modified_base 19: mod_base = OTHER; note = 2'-O-methylcytidine-3'-phosphorothioate
  modified_base 20: mod_base = OTHER; note = 2'-O-methyladenosine-3'-phosphorothioate
  modified_base 21: mod_base = OTHER; note = 2'-O-methyladenosine
acacgtcccgggaggcggcaa

SEQ ID NO: 410 - RNA, 21 nt, synthetic construct
  source 1..21: mol_type = other RNA
  modified_base 1: mod_base = OTHER; note = 2'-O-methylcytidine-3'-phosphorothioate
  modified_base 2: mod_base = OTHER; note = 2'-O-methyladenosine-3'-phosphorothioate
  modified_base 3: mod_base = OTHER; note = 2'-O-methylcytidine-3'-phosphate
  modified_base 4: mod_base = OTHER; note = 2'-O-methylguanosine-3'-phosphate
  modified_base 5: mod_base = OTHER; note = 2'-O-methyluridine-3'-phosphate
  modified_base 6: mod_base = OTHER; note = 2'-O-hexadecyl-cytidine-3'-phosphate
  modified_base 7: mod_base = OTHER; note = 2'-O-methylcytidine-3'-phosphate
  modified_base 8: mod_base = OTHER; note = 2'-O-methylcytidine-3'-phosphate
  modified_base 9: mod_base = OTHER; note = 2'-deoxy-2'-fluoroguanosine-3'-phosphate
  modified_base 10: mod_base = OTHER; note = 2'-deoxy-2'-fluoroguanosine-3'-phosphate
  modified_base 11: mod_base = OTHER; note = 2'-deoxy-2'-fluoroguanosine-3'-phosphate
  modified_base 12: mod_base = OTHER; note = 2'-O-methyladenosine-3'-phosphate
  modified_base 13: mod_base = OTHER; note = 2'-O-methylguanosine-3'-phosphate
  modified_base 14: mod_base = OTHER; note = 2'-O-methylguanosine-3'-phosphate
  modified_base 15: mod_base = OTHER; note = 2'-O-methylcytidine-3'-phosphate
  modified_base 16: mod_base = OTHER; note = 2'-O-methylguanosine-3'-phosphate
  modified_base 17: mod_base = OTHER; note = 2'-O-methylguanosine-3'-phosphate
  modified_base 18: mod_base = OTHER; note = 2'-O-methylcytidine-3'-phosphate
  modified_base 19: mod_base = OTHER; note = 2'-O-methyladenosine-3'-phosphorothioate
  modified_base 20: mod_base = OTHER; note = 2'-O-methylguanosine-3'-phosphorothioate
  modified_base 21: mod_base = OTHER; note = 2'-O-methyladenosine
cacgtcccgggaggcggcaga

SEQ ID NO: 411 - RNA, 21 nt, synthetic construct
  source 1..21: mol_type = other RNA
  modified_base 1: mod_base = OTHER; note = 2'-O-methylguanosine-3'-phosphorothioate
  modified_base 2: mod_base = OTHER; note = 2'-O-methylcytidine-3'-phosphorothioate
  modified_base 3: mod_base = OTHER; note = 2'-O-methyladenosine-3'-phosphate
  modified_base 4: mod_base = OTHER; note = 2'-O-methylguanosine-3'-phosphate
  modified_base 5: mod_base = OTHER; note = 2'-O-methyladenosine-3'-phosphate
  modified_base 6: mod_base = OTHER; note = 2'-O-hexadecyl-uridine-3'-phosphate
  modified_base 7: mod_base = OTHER; note = 2'-O-methyladenosine-3'-phosphate
  modified_base 8: mod_base = OTHER; note = 2'-O-methyladenosine-3'-phosphate
  modified_base 9: mod_base = OTHER; note = 2'-deoxy-2'-fluorouridine-3'-phosphate
  modified_base 10: mod_base = OTHER; note = 2'-deoxy-2'-fluorouridine-3'-phosphate
  modified_base 11: mod_base = OTHER; note = 2'-deoxy-2'-fluoroadenosine-3'-phosphate
  modified_base 12: mod_base = OTHER; note = 2'-O-methyladenosine-3'-phosphate
  modified_base 13: mod_base = OTHER; note = 2'-O-methyluridine-3'-phosphate
  modified_base 14: mod_base = OTHER; note = 2'-O-methyladenosine-3'-phosphate
  modified_base 15: mod_base = OTHER; note = 2'-O-methyladenosine-3'-phosphate
  modified_base 16: mod_base = OTHER; note = 2'-O-methylguanosine-3'-phosphate
  modified_base 17: mod_base = OTHER; note = 2'-O-methyladenosine-3'-phosphate
  modified_base 18: mod_base = OTHER; note = 2'-O-methyladenosine-3'-phosphate
  modified_base 19: mod_base = OTHER; note = 2'-O-methylguanosine-3'-phosphorothioate
  modified_base 20: mod_base = OTHER; note = 2'-O-methylcytidine-3'-phosphorothioate
  modified_base 21: mod_base = OTHER; note = 2'-O-methyladenosine
gcagataattaataagaagca

SEQ ID NO: 412 - RNA, 21 nt, synthetic construct
  source 1..21: mol_type = other RNA
  modified_base 1: mod_base = OTHER; note = 2'-O-methylcytidine-3'-phosphorothioate
  modified_base 2: mod_base = OTHER; note = 2'-O-methyladenosine-3'-phosphorothioate
  modified_base 3: mod_base = OTHER; note = 2'-O-methylguanosine-3'-phosphate
  modified_base 4: mod_base = OTHER; note = 2'-O-methyladenosine-3'-phosphate
  modified_base 5: mod_base = OTHER; note = 2'-O-methyluridine-3'-phosphate
  modified_base 6: mod_base = OTHER; note = 2'-O-hexadecyl-adenosine-3'-phosphate
  modified_base 7: mod_base = OTHER; note = 2'-O-methyladenosine-3'-phosphate
  modified_base 8: mod_base = OTHER; note = 2'-O-methyluridine-3'-phosphate
  modified_base 9: mod_base = OTHER; note = 2'-deoxy-2'-fluorouridine-3'-phosphate
  modified_base 10: mod_base = OTHER; note = 2'-deoxy-2'-fluoroadenosine-3'-phosphate
  modified_base 11: mod_base = OTHER; note = 2'-deoxy-2'-fluoroadenosine-3'-phosphate
  modified_base 12: mod_base = OTHER; note = 2'-O-methyluridine-3'-phosphate
  modified_base 13: mod_base = OTHER; note = 2'-O-methyladenosine-3'-phosphate
  modified_base 14: mod_base = OTHER; note = 2'-O-methyladenosine-3'-phosphate
  modified_base 15: mod_base = OTHER; note = 2'-O-methylguanosine-3'-phosphate
  modified_base 16: mod_base = OTHER; note = 2'-O-methyladenosine-3'-phosphate
  modified_base 17: mod_base = OTHER; note = 2'-O-methyladenosine-3'-phosphate
  modified_base 18: mod_base = OTHER; note = 2'-O-methylguanosine-3'-phosphate
  modified_base 19: mod_base = OTHER; note = 2'-O-methylcytidine-3'-phosphorothioate
  modified_base 20: mod_base = OTHER; note = 2'-O-methyluridine-3'-phosphorothioate
  modified_base 21: mod_base = OTHER; note = 2'-O-methyladenosine
cagataattaataagaagcta

SEQ ID NO: 413 - RNA, 21 nt, synthetic construct
  source 1..21: mol_type = other RNA
  modified_base 1: mod_base = OTHER; note = 2'-O-methylguanosine-3'-phosphorothioate
  modified_base 2: mod_base = OTHER; note = 2'-O-methyladenosine-3'-phosphorothioate
  modified_base 3: mod_base = OTHER; note = 2'-O-methyluridine-3'-phosphate
  modified_base 4: mod_base = OTHER; note = 2'-O-methyladenosine-3'-phosphate
  modified_base 5: mod_base = OTHER; note = 2'-O-methyladenosine-3'-phosphate
  modified_base 6: mod_base = OTHER; note = 2'-O-hexadecyl-uridine-3'-phosphate
  modified_base 7: mod_base = OTHER; note = 2'-O-methyluridine-3'-phosphate
  modified_base 8: mod_base = OTHER; note = 2'-O-methyladenosine-3'-phosphate
  modified_base 9: mod_base = OTHER; note = 2'-deoxy-2'-fluoroadenosine-3'-phosphate
  modified_base 10: mod_base = OTHER; note = 2'-deoxy-2'-fluorouridine-3'-phosphate
  modified_base 11: mod_base = OTHER; note = 2'-deoxy-2'-fluoroadenosine-3'-phosphate
  modified_base 12: mod_base = OTHER; note = 2'-O-methyladenosine-3'-phosphate
  modified_base 13: mod_base = OTHER; note = 2'-O-methylguanosine-3'-phosphate
  modified_base 14: mod_base = OTHER; note = 2'-O-methyladenosine-3'-phosphate
  modified_base 15: mod_base = OTHER; note = 2'-O-methyladenosine-3'-phosphate
  modified_base 16: mod_base = OTHER; note = 2'-O-methylguanosine-3'-phosphate
  modified_base 17: mod_base = OTHER; note = 2'-O-methylcytidine-3'-phosphate
  modified_base 18: mod_base = OTHER; note = 2'-O-methyluridine-3'-phosphate
  modified_base 19: mod_base = OTHER; note = 2'-O-methylguanosine-3'-phosphorothioate
  modified_base 20: mod_base = OTHER; note = 2'-O-methylguanosine-3'-phosphorothioate
  modified_base 21: mod_base = OTHER; note = 2'-O-methyladenosine
gataattaataagaagctgga

SEQ ID NO: 414 - RNA, 21 nt, synthetic construct
  source 1..21: mol_type = other RNA
  modified_base 1: mod_base = OTHER; note = 2'-O-methyladenosine-3'-phosphorothioate
  modified_base 2: mod_base = OTHER; note = 2'-O-methyluridine-3'-phosphorothioate
  modified_base 3: mod_base = OTHER; note = 2'-O-methyladenosine-3'-phosphate
  modified_base 4: mod_base = OTHER; note = 2'-O-methyladenosine-3'-phosphate
  modified_base 5: mod_base = OTHER; note = 2'-O-methyluridine-3'-phosphate
  modified_base 6: mod_base = OTHER; note = 2'-O-hexadecyl-uridine-3'-phosphate
  modified_base 7: mod_base = OTHER; note = 2'-O-methyladenosine-3'-phosphate
  modified_base 8: mod_base = OTHER; note = 2'-O-methyladenosine-3'-phosphate
  modified_base 9: mod_base = OTHER; note = 2'-deoxy-2'-fluorouridine-3'-phosphate
  modified_base 10: mod_base = OTHER; note = 2'-deoxy-2'-fluoroadenosine-3'-phosphate
  modified_base 11: mod_base = OTHER; note = 2'-deoxy-2'-fluoroadenosine-3'-phosphate
  modified_base 12: mod_base = OTHER; note = 2'-O-methylguanosine-3'-phosphate
  modified_base 13: mod_base = OTHER; note = 2'-O-methyladenosine-3'-phosphate
  modified_base 14: mod_base = OTHER; note = 2'-O-methyladenosine-3'-phosphate
  modified_base 15: mod_base = OTHER; note = 2'-O-methylguanosine-3'-phosphate
  modified_base 16: mod_base = OTHER; note = 2'-O-methylcytidine-3'-phosphate
  modified_base 17: mod_base = OTHER; note = 2'-O-methyluridine-3'-phosphate
  modified_base 18: mod_base = OTHER; note = 2'-O-methylguanosine-3'-phosphate
  modified_base 19: mod_base = OTHER; note = 2'-O-methylguanosine-3'-phosphorothioate
  modified_base 20: mod_base = OTHER; note = 2'-O-methyladenosine-3'-phosphorothioate
  modified_base 21: mod_base = OTHER; note = 2'-O-methyladenosine
ataattaataagaagctggaa

SEQ ID NO: 415 - RNA, 21 nt, synthetic construct
  source 1..21: mol_type = other RNA
  modified_base 1: mod_base = OTHER; note = 2'-O-methyluridine-3'-phosphorothioate
  modified_base 2: mod_base = OTHER; note = 2'-O-methyladenosine-3'-phosphorothioate
  modified_base 3: mod_base = OTHER; note = 2'-O-methyladenosine-3'-phosphate
  modified_base 4: mod_base = OTHER; note = 2'-O-methyluridine-3'-phosphate
  modified_base 5: mod_base = OTHER; note = 2'-O-methyluridine-3'-phosphate
  modified_base 6: mod_base = OTHER; note = 2'-O-hexadecyl-adenosine-3'-phosphate
  modified_base 7: mod_base = OTHER; note = 2'-O-methyladenosine-3'-phosphate
  modified_base 8: mod_base = OTHER; note = 2'-O-methyluridine-3'-phosphate
  modified_base 9: mod_base = OTHER; note = 2'-deoxy-2'-fluoroadenosine-3'-phosphate
  modified_base 10: mod_base = OTHER; note = 2'-deoxy-2'-fluoroadenosine-3'-phosphate
  modified_base 11: mod_base = OTHER; note = 2'-deoxy-2'-fluoroguanosine-3'-phosphate
  modified_base 12: mod_base = OTHER; note = 2'-O-methyladenosine-3'-phosphate
  modified_base 13: mod_base = OTHER; note = 2'-O-methyladenosine-3'-phosphate
  modified_base 14: mod_base = OTHER; note = 2'-O-methylguanosine-3'-phosphate
  modified_base 15: mod_base = OTHER; note = 2'-O-methylcytidine-3'-phosphate
  modified_base 16: mod_base = OTHER; note = 2'-O-methyluridine-3'-phosphate
  modified_base 17: mod_base = OTHER; note = 2'-O-methylguanosine-3'-phosphate
  modified_base 18: mod_base = OTHER; note = 2'-O-methylguanosine-3'-phosphate
  modified_base 19: mod_base = OTHER; note = 2'-O-methyladenosine-3'-phosphorothioate
  modified_base 20: mod_base = OTHER; note = 2'-O-methyluridine-3'-phosphorothioate
  modified_base 21: mod_base = OTHER; note = 2'-O-methyladenosine
taattaataagaagctggata

SEQ ID NO: 416 - RNA, 21 nt, synthetic construct
  source 1..21: mol_type = other RNA
  modified_base 1: mod_base = OTHER; note = 2'-O-methyladenosine-3'-phosphorothioate
  modified_base 2: mod_base = OTHER; note = 2'-O-methyladenosine-3'-phosphorothioate
  modified_base 3: mod_base = OTHER; note = 2'-O-methyluridine-3'-phosphate
  modified_base 4: mod_base = OTHER; note = 2'-O-methyluridine-3'-phosphate
  modified_base 5: mod_base = OTHER; note = 2'-O-methyladenosine-3'-phosphate
  modified_base 6: mod_base = OTHER; note = 2'-O-hexadecyl-adenosine-3'-phosphate
  modified_base 7: mod_base = OTHER; note = 2'-O-methyluridine-3'-phosphate
  modified_base 8: mod_base = OTHER; note = 2'-O-methyladenosine-3'-phosphate
  modified_base 9: mod_base = OTHER; note = 2'-deoxy-2'-fluoroadenosine-3'-phosphate
  modified_base 10: mod_base = OTHER; note = 2'-deoxy-2'-fluoroguanosine-3'-phosphate
  modified_base 11: mod_base = OTHER; note = 2'-deoxy-2'-fluoroadenosine-3'-phosphate
  modified_base 12: mod_base = OTHER; note = 2'-O-methyladenosine-3'-phosphate
  modified_base 13: mod_base = OTHER; note = 2'-O-methylguanosine-3'-phosphate
  modified_base 14: mod_base = OTHER; note = 2'-O-methylcytidine-3'-phosphate
  modified_base 15: mod_base = OTHER; note = 2'-O-methyluridine-3'-phosphate
  modified_base 16: mod_base = OTHER; note = 2'-O-methylguanosine-3'-phosphate
  modified_base 17: mod_base = OTHER; note = 2'-O-methylguanosine-3'-phosphate
  modified_base 18: mod_base = OTHER; note = 2'-O-methyladenosine-3'-phosphate
  modified_base 19: mod_base = OTHER; note = 2'-O-methyluridine-3'-phosphorothioate
  modified_base 20: mod_base = OTHER; note = 2'-O-methylcytidine-3'-phosphorothioate
  modified_base 21: mod_base = OTHER; note = 2'-O-methyladenosine
aattaataagaagctggatca

SEQ ID NO: 417 - RNA, 21 nt, synthetic construct
  source 1..21: mol_type = other RNA
  modified_base 1: mod_base = OTHER; note = 2'-O-methyladenosine-3'-phosphorothioate
  modified_base 2: mod_base = OTHER; note = 2'-O-methyluridine-3'-phosphorothioate
  modified_base 3: mod_base = OTHER; note = 2'-O-methyluridine-3'-phosphate
  modified_base 4: mod_base = OTHER; note = 2'-O-methyladenosine-3'-phosphate
  modified_base 5: mod_base = OTHER; note = 2'-O-methyladenosine-3'-phosphate
  modified_base 6: mod_base = OTHER; note = 2'-O-hexadecyl-uridine-3'-phosphate
  modified_base 7: mod_base = OTHER; note = 2'-O-methyladenosine-3'-phosphate
  modified_base 8: mod_base = OTHER; note = 2'-O-methyladenosine-3'-phosphate
  modified_base 9: mod_base = OTHER; note = 2'-deoxy-2'-fluoroguanosine-3'-phosphate
  modified_base 10: mod_base = OTHER; note = 2'-deoxy-2'-fluoroadenosine-3'-phosphate
  modified_base 11: mod_base = OTHER; note = 2'-deoxy-2'-fluoroadenosine-3'-phosphate
  modified_base 12: mod_base = OTHER; note = 2'-O-methylguanosine-3'-phosphate
  modified_base 13: mod_base = OTHER; note = 2'-O-methylcytidine-3'-phosphate
  modified_base 14: mod_base = OTHER; note = 2'-O-methyluridine-3'-phosphate
  modified_base 15: mod_base = OTHER; note = 2'-O-methylguanosine-3'-phosphate
  modified_base 16: mod_base = OTHER; note = 2'-O-methylguanosine-3'-phosphate
  modified_base 17: mod_base = OTHER; note = 2'-O-methyladenosine-3'-phosphate
  modified_base 18: mod_base = OTHER; note = 2'-O-methyluridine-3'-phosphate
  modified_base 19: mod_base = OTHER; note = 2'-O-methylcytidine-3'-phosphorothioate
  modified_base 20: mod_base = OTHER; note = 2'-O-methyluridine-3'-phosphorothioate
  modified_base 21: mod_base = OTHER; note = 2'-O-methyladenosine
attaataagaagctggatcta

SEQ ID NO: 418 - RNA, 21 nt, synthetic construct
  source 1..21: mol_type = other RNA
  modified_base 1: mod_base = OTHER; note = 2'-O-methyluridine-3'-phosphorothioate
  modified_base 2: mod_base = OTHER; note = 2'-O-methyladenosine-3'-phosphorothioate
  modified_base 3: mod_base = OTHER; note = 2'-O-methyladenosine-3'-phosphate
  modified_base 4: mod_base = OTHER; note = 2'-O-methyluridine-3'-phosphate
  modified_base 5: mod_base = OTHER; note = 2'-O-methyladenosine-3'-phosphate
  modified_base 6: mod_base = OTHER; note = 2'-O-hexadecyl-adenosine-3'-phosphate
  modified_base 7: mod_base = OTHER; note = 2'-O-methylguanosine-3'-phosphate
  modified_base 8: mod_base = OTHER; note = 2'-O-methyladenosine-3'-phosphate
  modified_base 9: mod_base = OTHER; note = 2'-deoxy-2'-fluoroadenosine-3'-phosphate
  modified_base 10: mod_base = OTHER; note = 2'-deoxy-2'-fluoroguanosine-3'-phosphate
  modified_base 11: mod_base = OTHER; note = 2'-deoxy-2'-fluorocytidine-3'-phosphate
  modified_base 12: mod_base = OTHER; note = 2'-O-methyluridine-3'-phosphate
  modified_base 13: mod_base = OTHER; note = 2'-O-methylguanosine-3'-phosphate
  modified_base 14: mod_base = OTHER; note = 2'-O-methylguanosine-3'-phosphate
  modified_base 15: mod_base = OTHER; note = 2'-O-methyladenosine-3'-phosphate
  modified_base 16: mod_base = OTHER; note = 2'-O-methyluridine-3'-phosphate
  modified_base 17: mod_base = OTHER; note = 2'-O-methylcytidine-3'-phosphate
  modified_base 18: mod_base = OTHER; note = 2'-O-methyluridine-3'-phosphate
  modified_base 19: mod_base = OTHER; note = 2'-O-methyluridine-3'-phosphorothioate
  modified_base 20: mod_base = OTHER; note = 2'-O-methyladenosine-3'-phosphorothioate
  modified_base 21: mod_base = OTHER; note = 2'-O-methyladenosine
taataagaagctggatcttaa

SEQ ID NO: 419 - RNA, 21 nt, synthetic construct
  source 1..21: mol_type = other RNA
  modified_base 1: mod_base = OTHER; note = 2'-O-methyladenosine-3'-phosphorothioate
  modified_base 2: mod_base = OTHER; note = 2'-O-methyladenosine-3'-phosphorothioate
  modified_base 3: mod_base = OTHER; note = 2'-O-methyluridine-3'-phosphate
  modified_base 4: mod_base = OTHER; note = 2'-O-methyladenosine-3'-phosphate
  modified_base 5: mod_base = OTHER; note = 2'-O-methyladenosine-3'-phosphate
  modified_base 6: mod_base = OTHER; note = 2'-O-hexadecyl-guanosine-3'-phosphate
  modified_base 7: mod_base = OTHER; note = 2'-O-methyladenosine-3'-phosphate
  modified_base 8: mod_base = OTHER; note = 2'-O-methyladenosine-3'-phosphate
  modified_base 9: mod_base = OTHER; note = 2'-deoxy-2'-fluoroguanosine-3'-phosphate
  modified_base 10: mod_base = OTHER; note = 2'-deoxy-2'-fluorocytidine-3'-phosphate
  modified_base 11: mod_base = OTHER; note = 2'-deoxy-2'-fluorouridine-3'-phosphate
  modified_base 12: mod_base = OTHER; note = 2'-O-methylguanosine-3'-phosphate
  modified_base 13: mod_base = OTHER; note = 2'-O-methylguanosine-3'-phosphate
  modified_base 14: mod_base = OTHER; note = 2'-O-methyladenosine-3'-phosphate
  modified_base 15: mod_base = OTHER; note = 2'-O-methyluridine-3'-phosphate
  modified_base 16: mod_base = OTHER; note = 2'-O-methylcytidine-3'-phosphate
  modified_base 17: mod_base = OTHER; note = 2'-O-methyluridine-3'-phosphate
  modified_base 18: mod_base = OTHER; note = 2'-O-methyluridine-3'-phosphate
  modified_base 19: mod_base = OTHER; note = 2'-O-methyladenosine-3'-phosphorothioate
  modified_base 20: mod_base = OTHER; note = 2'-O-methylguanosine-3'-phosphorothioate
  modified_base 21: mod_base = OTHER; note = 2'-O-methyladenosine
aataagaagctggatcttaga

SEQ ID NO: 420 - RNA, 21 nt, synthetic construct
  source 1..21: mol_type = other RNA
  modified_base 1: mod_base = OTHER; note = 2'-O-methyluridine-3'-phosphorothioate
  modified_base 2: mod_base = OTHER; note = 2'-O-methyladenosine-3'-phosphorothioate
  modified_base 3: mod_base = OTHER; note = 2'-O-methyladenosine-3'-phosphate
  modified_base 4: mod_base = OTHER; note = 2'-O-methylguanosine-3'-phosphate
  modified_base 5: mod_base = OTHER; note = 2'-O-methyladenosine-3'-phosphate
  modified_base 6: mod_base = OTHER; note = 2'-O-hexadecyl-adenosine-3'-phosphate
  modified_base 7: mod_base = OTHER; note = 2'-O-methylguanosine-3'-phosphate
  modified_base 8: mod_base = OTHER; note = 2'-O-methylcytidine-3'-phosphate
  modified_base 9: mod_base = OTHER; note = 2'-deoxy-2'-fluorouridine-3'-phosphate
  modified_base 10: mod_base = OTHER; note = 2'-deoxy-2'-fluoroguanosine-3'-phosphate
  modified_base 11: mod_base = OTHER; note = 2'-deoxy-2'-fluoroguanosine-3'-phosphate
  modified_base 12: mod_base = OTHER; note = 2'-O-methyladenosine-3'-phosphate
  modified_base 13: mod_base = OTHER; note = 2'-O-methyluridine-3'-phosphate
  modified_base 14: mod_base = OTHER; note = 2'-O-methylcytidine-3'-phosphate
  modified_base 15: mod_base = OTHER; note = 2'-O-methyluridine-3'-phosphate
  modified_base 16: mod_base = OTHER; note = 2'-O-methyluridine-3'-phosphate
  modified_base 17: mod_base = OTHER; note = 2'-O-methyladenosine-3'-phosphate
  modified_base 18: mod_base = OTHER; note = 2'-O-methylguanosine-3'-phosphate
  modified_base 19: mod_base = OTHER; note = 2'-O-methylcytidine-3'-phosphorothioate
  modified_base 20: mod_base = OTHER; note = 2'-O-methyladenosine-3'-phosphorothioate
  modified_base 21: mod_base = OTHER; note = 2'-O-methyladenosine
taagaagctggatcttagcaa

SEQ ID NO: 421 - RNA, 21 nt, synthetic construct
  source 1..21: mol_type = other RNA
  modified_base 1: mod_base = OTHER; note = 2'-O-methyladenosine-3'-phosphorothioate
  modified_base 2: mod_base = OTHER; note = 2'-O-methyladenosine-3'-phosphorothioate
  modified_base 3: mod_base = OTHER; note = 2'-O-methylguanosine-3'-phosphate
  modified_base 4: mod_base = OTHER; note = 2'-O-methyladenosine-3'-phosphate
  modified_base 5: mod_base = OTHER; note = 2'-O-methyladenosine-3'-phosphate
  modified_base 6: mod_base = OTHER; note = 2'-O-hexadecyl-guanosine-3'-phosphate
  modified_base 7: mod_base = OTHER; note = 2'-O-methylcytidine-3'-phosphate
  modified_base 8: mod_base = OTHER; note = 2'-O-methyluridine-3'-phosphate
  modified_base 9: mod_base = OTHER; note = 2'-deoxy-2'-fluoroguanosine-3'-phosphate
  modified_base 10: mod_base = OTHER; note = 2'-deoxy-2'-fluoroguanosine-3'-phosphate
  modified_base 11: mod_base = OTHER; note = 2'-deoxy-2'-fluoroadenosine-3'-phosphate
  modified_base 12: mod_base = OTHER; note = 2'-O-methyluridine-3'-phosphate
  modified_base 13: mod_base = OTHER; note = 2'-O-methylcytidine-3'-phosphate
  modified_base 14: mod_base = OTHER; note = 2'-O-methyluridine-3'-phosphate
  modified_base 15: mod_base = OTHER; note = 2'-O-methyluridine-3'-phosphate
  modified_base 16: mod_base = OTHER; note = 2'-O-methyladenosine-3'-phosphate
  modified_base 17: mod_base = OTHER; note = 2'-O-methylguanosine-3'-phosphate
  modified_base 18: mod_base = OTHER; note = 2'-O-methylcytidine-3'-phosphate
  modified_base 19: mod_base = OTHER; note = 2'-O-methyladenosine-3'-phosphorothioate
  modified_base 20: mod_base = OTHER; note = 2'-O-methyladenosine-3'-phosphorothioate
  modified_base 21: mod_base = OTHER; note = 2'-O-methyladenosine
aagaagctggatcttagcaaa

SEQ ID NO: 422 - RNA, 21 nt, synthetic construct
  source 1..21: mol_type = other RNA
  modified_base 1: mod_base = OTHER; note = 2'-O-methyladenosine-3'-phosphorothioate
  modified_base 2: mod_base = OTHER; note = 2'-O-methylguanosine-3'-phosphorothioate
  modified_base 3: mod_base = OTHER; note = 2'-O-methyladenosine-3'-phosphate
  modified_base 4: mod_base = OTHER; note = 2'-O-methyladenosine-3'-phosphate
  modified_base 5: mod_base = OTHER; note = 2'-O-methylguanosine-3'-phosphate
  modified_base 6: mod_base = OTHER; note = 2'-O-hexadecyl-cytidine-3'-phosphate
  modified_base 7: mod_base = OTHER; note = 2'-O-methyluridine-3'-phosphate
  modified_base 8: mod_base = OTHER; note = 2'-O-methylguanosine-3'-phosphate
  modified_base 9: mod_base = OTHER; note = 2'-deoxy-2'-fluoroguanosine-3'-phosphate
  modified_base 10: mod_base = OTHER; note = 2'-deoxy-2'-fluoroadenosine-3'-phosphate
  modified_base 11: mod_base = OTHER; note = 2'-deoxy-2'-fluorouridine-3'-phosphate
  modified_base 12: mod_base = OTHER; note = 2'-O-methylcytidine-3'-phosphate
  modified_base 13: mod_base = OTHER; note = 2'-O-methyluridine-3'-phosphate
  modified_base 14: mod_base = OTHER; note = 2'-O-methyluridine-3'-phosphate
  modified_base 15: mod_base = OTHER; note = 2'-O-methyladenosine-3'-phosphate
  modified_base 16: mod_base = OTHER; note = 2'-O-methylguanosine-3'-phosphate
  modified_base 17: mod_base = OTHER; note = 2'-O-methylcytidine-3'-phosphate
  modified_base 18: mod_base = OTHER; note = 2'-O-methyladenosine-3'-phosphate
  modified_base 19: mod_base = OTHER; note = 2'-O-methyladenosine-3'-phosphorothioate
  modified_base 20: mod_base = OTHER; note = 2'-O-methylcytidine-3'-phosphorothioate
  modified_base 21: mod_base = OTHER; note = 2'-O-methyladenosine
agaagctggatcttagcaaca

SEQ ID NO: 423 - RNA, 21 nt, synthetic construct
  source 1..21: mol_type = other RNA
  modified_base 1: mod_base = OTHER; note = 2'-O-methylguanosine-3'-phosphorothioate
  modified_base 2: mod_base = OTHER; note = 2'-O-methyladenosine-3'-phosphorothioate
  modified_base 3: mod_base = OTHER; note = 2'-O-methyladenosine-3'-phosphate
  modified_base 4: mod_base = OTHER; note = 2'-O-methylguanosine-3'-phosphate
  modified_base 5: mod_base = OTHER; note = 2'-O-methylcytidine-3'-phosphate
  modified_base 6: mod_base = OTHER; note = 2'-O-hexadecyl-uridine-3'-phosphate
  modified_base 7: mod_base = OTHER; note = 2'-O-methylguanosine-3'-phosphate
  modified_base 8: mod_base = OTHER; note = 2'-O-methylguanosine-3'-phosphate
  modified_base 9: mod_base = OTHER; note = 2'-deoxy-2'-fluoroadenosine-3'-phosphate
  modified_base 10: mod_base = OTHER; note = 2'-deoxy-2'-fluorouridine-3'-phosphate
  modified_base 11: mod_base = OTHER; note = 2'-deoxy-2'-fluorocytidine-3'-phosphate
  modified_base 12: mod_base = OTHER; note = 2'-O-methyluridine-3'-phosphate
  modified_base 13: mod_base = OTHER; note = 2'-O-methyluridine-3'-phosphate
  modified_base 14: mod_base = OTHER; note = 2'-O-methyladenosine-3'-phosphate
  modified_base 15: mod_base = OTHER; note = 2'-O-methylguanosine-3'-phosphate
  modified_base 16: mod_base = OTHER; note = 2'-O-methylcytidine-3'-phosphate
  modified_base 17: mod_base = OTHER; note = 2'-O-methyladenosine-3'-phosphate
  modified_base 18: mod_base = OTHER; note = 2'-O-methyladenosine-3'-phosphate
  modified_base 19: mod_base = OTHER; note = 2'-O-methylcytidine-3'-phosphorothioate
  modified_base 20: mod_base = OTHER; note = 2'-O-methylguanosine-3'-phosphorothioate
  modified_base 21: mod_base = OTHER; note = 2'-O-methyladenosine
gaagctggatcttagcaacga

SEQ ID NO: 424 - RNA, 21 nt, synthetic construct
  source 1..21: mol_type = other RNA
  modified_base 1: mod_base = OTHER; note = 2'-O-methyladenosine-3'-phosphorothioate
  modified_base 2: mod_base = OTHER; note = 2'-O-methyladenosine-3'-phosphorothioate
  modified_base 3: mod_base = OTHER; note = 2'-O-methylguanosine-3'-phosphate
  modified_base 4: mod_base = OTHER; note = 2'-O-methylcytidine-3'-phosphate
  modified_base 5: mod_base = OTHER; note = 2'-O-methyluridine-3'-phosphate
  modified_base 6: mod_base = OTHER; note = 2'-O-hexadecyl-guanosine-3'-phosphate
  modified_base 7: mod_base = OTHER; note = 2'-O-methylguanosine-3'-phosphate
  modified_base 8: mod_base = OTHER; note = 2'-O-methyladenosine-3'-phosphate
  modified_base 9: mod_base = OTHER; note = 2'-deoxy-2'-fluorouridine-3'-phosphate
  modified_base 10: mod_base = OTHER; note = 2'-deoxy-2'-fluorocytidine-3'-phosphate
  modified_base 11: mod_base = OTHER; note = 2'-deoxy-2'-fluorouridine-3'-phosphate
  modified_base 12: mod_base = OTHER; note = 2'-O-methyluridine-3'-phosphate
  modified_base 13: mod_base = OTHER; note = 2'-O-methyladenosine-3'-phosphate
  modified_base 14: mod_base = OTHER; note = 2'-O-methylguanosine-3'-phosphate
  modified_base 15: mod_base = OTHER; note = 2'-O-methylcytidine-3'-phosphate
  modified_base 16: mod_base = OTHER; note = 2'-O-methyladenosine-3'-phosphate
  modified_base 17: mod_base = OTHER; note = 2'-O-methyladenosine-3'-phosphate
  modified_base 18: mod_base = OTHER; note = 2'-O-methylcytidine-3'-phosphate
  modified_base 19: mod_base = OTHER; note = 2'-O-methylguanosine-3'-phosphorothioate
  modified_base 20: mod_base = OTHER; note = 2'-O-methyluridine-3'-phosphorothioate
  modified_base 21: mod_base = OTHER; note = 2'-O-methyladenosine
aagctggatcttagcaacgta

SEQ ID NO: 425 - RNA, 21 nt, synthetic construct
  source 1..21: mol_type = other RNA
  modified_base 1: mod_base = OTHER; note = 2'-O-methylcytidine-3'-phosphorothioate
  modified_base 2: mod_base = OTHER; note = 2'-O-methyluridine-3'-phosphorothioate
  modified_base 3: mod_base = OTHER; note = 2'-O-methylguanosine-3'-phosphate
  modified_base 4: mod_base = OTHER; note = 2'-O-methylguanosine-3'-phosphate
  modified_base 5: mod_base = OTHER; note = 2'-O-methyladenosine-3'-phosphate
  modified_base 6: mod_base = OTHER; note = 2'-O-hexadecyl-uridine-3'-phosphate
  modified_base 7: mod_base = OTHER; note = 2'-O-methylcytidine-3'-phosphate
  modified_base 8: mod_base = OTHER; note = 2'-O-methyluridine-3'-phosphate
  modified_base 9: mod_base = OTHER; note = 2'-deoxy-2'-fluorouridine-3'-phosphate
  modified_base 10: mod_base = OTHER; note = 2'-deoxy-2'-fluoroadenosine-3'-phosphate
  modified_base 11: mod_base = OTHER; note = 2'-deoxy-2'-fluoroguanosine-3'-phosphate
  modified_base 12: mod_base = OTHER; note = 2'-O-methylcytidine-3'-phosphate
  modified_base 13: mod_base = OTHER; note = 2'-O-methyladenosine-3'-phosphate
  modified_base 14: mod_base = OTHER; note = 2'-O-methyladenosine-3'-phosphate
  modified_base 15: mod_base = OTHER; note = 2'-O-methylcytidine-3'-phosphate
  modified_base 16: mod_base = OTHER; note = 2'-O-methylguanosine-3'-phosphate
  modified_base 17: mod_base = OTHER; note = 2'-O-methyluridine-3'-phosphate
  modified_base 18: mod_base = OTHER; note = 2'-O-methylcytidine-3'-phosphate
  modified_base 19: mod_base = OTHER; note = 2'-O-methylcytidine-3'-phosphorothioate
  modified_base 20: mod_base = OTHER; note = 2'-O-methyladenosine-3'-phosphorothioate
  modified_base 21: mod_base = OTHER; note = 2'-O-methyladenosine
ctggatcttagcaacgtccaa

SEQ ID NO: 426 - RNA, 21 nt, synthetic construct
  source 1..21: mol_type = other RNA
  modified_base 1: mod_base = OTHER; note = 2'-O-methylguanosine-3'-phosphorothioate
  modified_base 2: mod_base = OTHER; note = 2'-O-methylguanosine-3'-phosphorothioate
  modified_base 3: mod_base = OTHER; note = 2'-O-methyladenosine-3'-phosphate
  modified_base 4: mod_base = OTHER; note = 2'-O-methyluridine-3'-phosphate
  modified_base 5: mod_base = OTHER; note = 2'-O-methylcytidine-3'-phosphate
  modified_base 6: mod_base = OTHER; note = 2'-O-hexadecyl-uridine-3'-phosphate
  modified_base 7: mod_base = OTHER; note = 2'-O-methyluridine-3'-phosphate
  modified_base 8: mod_base = OTHER; note = 2'-O-methyladenosine-3'-phosphate
  modified_base 9: mod_base = OTHER; note = 2'-deoxy-2'-fluoroguanosine-3'-phosphate
  modified_base 10: mod_base = OTHER; note = 2'-deoxy-2'-fluorocytidine-3'-phosphate
  modified_base 11: mod_base = OTHER; note = 2'-deoxy-2'-fluoroadenosine-3'-phosphate
  modified_base 12: mod_base = OTHER; note = 2'-O-methyladenosine-3'-phosphate
  modified_base 13: mod_base = OTHER; note = 2'-O-methylcytidine-3'-phosphate
  modified_base 14: mod_base = OTHER; note = 2'-O-methylguanosine-3'-phosphate
  modified_base 15: mod_base = OTHER; note = 2'-O-methyluridine-3'-phosphate
  modified_base 16: mod_base = OTHER; note = 2'-O-methylcytidine-3'-phosphate
  modified_base 17: mod_base = OTHER; note = 2'-O-methylcytidine-3'-phosphate
  modified_base 18: mod_base = OTHER; note = 2'-O-methyladenosine-3'-phosphate
  modified_base 19: mod_base = OTHER; note = 2'-O-methylguanosine-3'-phosphorothioate
  modified_base 20: mod_base = OTHER; note = 2'-O-methyluridine-3'-phosphorothioate
  modified_base 21: mod_base = OTHER; note = 2'-O-methyladenosine
ggatcttagcaacgtccagta

SEQ ID NO: 427 - RNA, 21 nt, synthetic construct
  source 1..21: mol_type = other RNA
  modified_base 1: mod_base = OTHER; note = 2'-O-methylguanosine-3'-phosphorothioate
  modified_base 2: mod_base = OTHER; note = 2'-O-methyladenosine-3'-phosphorothioate
  modified_base 3: mod_base = OTHER; note = 2'-O-methyluridine-3'-phosphate
  modified_base 4: mod_base = OTHER; note = 2'-O-methylcytidine-3'-phosphate
  modified_base 5: mod_base = OTHER; note = 2'-O-methyluridine-3'-phosphate
  modified_base 6: mod_base = OTHER; note = 2'-O-hexadecyl-uridine-3'-phosphate
  modified_base 7: mod_base = OTHER; note = 2'-O-methyladenosine-3'-phosphate
  modified_base 8: mod_base = OTHER; note = 2'-O-methylguanosine-3'-phosphate
  modified_base 9: mod_base = OTHER; note = 2'-deoxy-2'-fluorocytidine-3'-phosphate
  modified_base 10: mod_base = OTHER; note = 2'-deoxy-2'-fluoroadenosine-3'-phosphate
  modified_base 11: mod_base = OTHER; note = 2'-deoxy-2'-fluoroadenosine-3'-phosphate
  modified_base 12: mod_base = OTHER; note = 2'-O-methylcytidine-3'-phosphate
  modified_base 13: mod_base = OTHER; note = 2'-O-methylguanosine-3'-phosphate
  modified_base 14: mod_base = OTHER; note = 2'-O-methyluridine-3'-phosphate
  modified_base 15: mod_base = OTHER; note = 2'-O-methylcytidine-3'-phosphate
  modified_base 16: mod_base = OTHER; note = 2'-O-methylcytidine-3'-phosphate
  modified_base 17: mod_base = OTHER; note = 2'-O-methyladenosine-3'-phosphate
  modified_base 18: mod_base = OTHER; note = 2'-O-methylguanosine-3'-phosphate
  modified_base 19: mod_base = OTHER; note = 2'-O-methyluridine-3'-phosphorothioate
  modified_base 20: mod_base = OTHER; note = 2'-O-methylcytidine-3'-phosphorothioate
  modified_base 21: mod_base = OTHER; note = 2'-O-methyladenosine
gatcttagcaacgtccagtca

SEQ ID NO: 428 - RNA, 21 nt, synthetic construct
  source 1..21: mol_type = other RNA
  modified_base 1: mod_base = OTHER; note = 2'-O-methyladenosine-3'-phosphorothioate
  modified_base 2: mod_base = OTHER; note = 2'-O-methyluridine-3'-phosphorothioate
  modified_base 3: mod_base = OTHER; note = 2'-O-methylcytidine-3'-phosphate
  modified_base 4: mod_base = OTHER; note = 2'-O-methyluridine-3'-phosphate
  modified_base 5: mod_base = OTHER; note = 2'-O-methyluridine-3'-phosphate
  modified_base 6: mod_base = OTHER; note = 2'-O-hexadecyl-adenosine-3'-phosphate
  modified_base 7: mod_base = OTHER; note = 2'-O-methylguanosine-3'-phosphate
  modified_base 8: mod_base = OTHER; note = 2'-O-methylcytidine-3'-phosphate
  modified_base 9: mod_base = OTHER; note = 2'-deoxy-2'-fluoroadenosine-3'-phosphate
  modified_base 10: mod_base = OTHER; note = 2'-deoxy-2'-fluoroadenosine-3'-phosphate
  modified_base 11: mod_base = OTHER; note = 2'-deoxy-2'-fluorocytidine-3'-phosphate
  modified_base 12: mod_base = OTHER; note = 2'-O-methylguanosine-3'-phosphate
  modified_base 13: mod_base = OTHER; note = 2'-O-methyluridine-3'-phosphate
  modified_base 14: mod_base = OTHER; note = 2'-O-methylcytidine-3'-phosphate
  modified_base 15: mod_base = OTHER; note = 2'-O-methylcytidine-3'-phosphate
  modified_base 16: mod_base = OTHER; note = 2'-O-methyladenosine-3'-phosphate
  modified_base 17: mod_base = OTHER; note = 2'-O-methylguanosine-3'-phosphate
  modified_base 18: mod_base = OTHER; note = 2'-O-methyluridine-3'-phosphate
  modified_base 19: mod_base = OTHER; note = 2'-O-methylcytidine-3'-phosphorothioate
  modified_base 20: mod_base = OTHER; note = 2'-O-methylcytidine-3'-phosphorothioate
  modified_base 21: mod_base = OTHER; note = 2'-O-methyladenosine
atcttagcaacgtccagtcca

SEQ ID NO: 429 - RNA, 21 nt, synthetic construct
  source 1..21: mol_type = other RNA
  modified_base 1: mod_base = OTHER; note = 2'-O-methyluridine-3'-phosphorothioate
  modified_base 2: mod_base = OTHER; note = 2'-O-methylcytidine-3'-phosphorothioate
  modified_base 3: mod_base = OTHER; note = 2'-O-methyluridine-3'-phosphate
  modified_base 4: mod_base = OTHER; note = 2'-O-methyluridine-3'-phosphate
  modified_base 5: mod_base = OTHER; note = 2'-O-methyladenosine-3'-phosphate
  modified_base 6: mod_base = OTHER; note = 2'-O-hexadecyl-guanosine-3'-phosphate
  modified_base 7: mod_base = OTHER; note = 2'-O-methylcytidine-3'-phosphate
  modified_base 8: mod_base = OTHER; note = 2'-O-methyladenosine-3'-phosphate
  modified_base 9: mod_base = OTHER; note = 2'-deoxy-2'-fluoroadenosine-3'-phosphate
  modified_base 10: mod_base = OTHER; note = 2'-deoxy-2'-fluorocytidine-3'-phosphate
  modified_base 11: mod_base = OTHER; note = 2'-deoxy-2'-fluoroguanosine-3'-phosphate
  modified_base 12: mod_base = OTHER; note = 2'-O-methyluridine-3'-phosphate
  modified_base 13: mod_base = OTHER; note = 2'-O-methylcytidine-3'-phosphate
  modified_base 14: mod_base = OTHER; note = 2'-O-methylcytidine-3'-phosphate
  modified_base 15: mod_base = OTHER; note = 2'-O-methyladenosine-3'-phosphate
  modified_base 16: mod_base = OTHER; note = 2'-O-methylguanosine-3'-phosphate
  modified_base 17: mod_base = OTHER; note = 2'-O-methyluridine-3'-phosphate
  modified_base 18: mod_base = OTHER; note = 2'-O-methylcytidine-3'-phosphate
  modified_base 19: mod_base = OTHER; note = 2'-O-methylcytidine-3'-phosphorothioate
  modified_base 20: mod_base = OTHER; note = 2'-O-methyladenosine-3'-phosphorothioate
  modified_base 21: mod_base = OTHER; note = 2'-O-methyladenosine
tcttagcaacgtccagtccaa

SEQ ID NO: 430 - RNA, 21 nt, synthetic construct
  source 1..21: mol_type = other RNA
  modified_base 1: mod_base = OTHER; note = 2'-O-methylcytidine-3'-phosphorothioate
  modified_base 2: mod_base = OTHER; note = 2'-O-methyluridine-3'-phosphorothioate
  modified_base 3: mod_base = OTHER; note = 2'-O-methyluridine-3'-phosphate
  modified_base 4: mod_base = OTHER; note = 2'-O-methyladenosine-3'-phosphate
  modified_base 5: mod_base = OTHER; note = 2'-O-methylguanosine-3'-phosphate
  modified_base 6: mod_base = OTHER; note = 2'-O-hexadecyl-cytidine-3'-phosphate
  modified_base 7: mod_base = OTHER; note = 2'-O-methyladenosine-3'-phosphate
  modified_base 8: mod_base = OTHER; note = 2'-O-methyladenosine-3'-phosphate
  modified_base 9: mod_base = OTHER; note = 2'-deoxy-2'-fluorocytidine-3'-phosphate
  modified_base 10: mod_base = OTHER; note = 2'-deoxy-2'-fluoroguanosine-3'-phosphate
  modified_base 11: mod_base = OTHER; note = 2'-deoxy-2'-fluorouridine-3'-phosphate
  modified_base 12: mod_base = OTHER; note = 2'-O-methylcytidine-3'-phosphate
  modified_base 13: mod_base = OTHER; note = 2'-O-methylcytidine-3'-phosphate
  modified_base 14: mod_base = OTHER; note = 2'-O-methyladenosine-3'-phosphate
  modified_base 15: mod_base = OTHER; note = 2'-O-methylguanosine-3'-phosphate
  modified_base 16: mod_base = OTHER; note = 2'-O-methyluridine-3'-phosphate
  modified_base 17: mod_base = OTHER; note = 2'-O-methylcytidine-3'-phosphate
  modified_base 18: mod_base = OTHER; note = 2'-O-methylcytidine-3'-phosphate
  modified_base 19: mod_base = OTHER; note = 2'-O-methyladenosine-3'-phosphorothioate
  modified_base 20: mod_base = OTHER; note = 2'-O-methyladenosine-3'-phosphorothioate
  modified_base 21: mod_base = OTHER; note = 2'-O-methyladenosine
cttagcaacgtccagtccaaa

SEQ ID NO: 431 - RNA, 21 nt, synthetic construct
  source 1..21: mol_type = other RNA
  modified_base 1: mod_base = OTHER; note = 2'-O-methyluridine-3'-phosphorothioate
  modified_base 2: mod_base = OTHER; note = 2'-O-methyluridine-3'-phosphorothioate
  modified_base 3: mod_base = OTHER; note = 2'-O-methyladenosine-3'-phosphate
  modified_base 4: mod_base = OTHER; note = 2'-O-methylguanosine-3'-phosphate
  modified_base 5: mod_base = OTHER; note = 2'-O-methylcytidine-3'-phosphate
  modified_base 6: mod_base = OTHER; note = 2'-O-hexadecyl-adenosine-3'-phosphate
  modified_base 7: mod_base = OTHER; note = 2'-O-methyladenosine-3'-phosphate
  modified_base 8: mod_base = OTHER; note = 2'-O-methylcytidine-3'-phosphate
  modified_base 9: mod_base = OTHER; note = 2'-deoxy-2'-fluoroguanosine-3'-phosphate
  modified_base 10: mod_base = OTHER; note = 2'-deoxy-2'-fluorouridine-3'-phosphate
  modified_base 11: mod_base = OTHER; note = 2'-deoxy-2'-fluorocytidine-3'-phosphate
  modified_base 12: mod_base = OTHER; note = 2'-O-methylcytidine-3'-phosphate
  modified_base 13: mod_base = OTHER; note = 2'-O-methyladenosine-3'-phosphate
  modified_base 14: mod_base = OTHER; note = 2'-O-methylguanosine-3'-phosphate
  modified_base 15: mod_base = OTHER; note = 2'-O-methyluridine-3'-phosphate
  modified_base 16: mod_base = OTHER; note = 2'-O-methylcytidine-3'-phosphate
  modified_base 17: mod_base = OTHER; note = 2'-O-methylcytidine-3'-phosphate
  modified_base 18: mod_base = OTHER; note = 2'-O-methyladenosine-3'-phosphate
  modified_base 19: mod_base = OTHER; note = 2'-O-methyladenosine-3'-phosphorothioate
  modified_base 20: mod_base = OTHER; note = 2'-O-methylguanosine-3'-phosphorothioate
  modified_base 21: mod_base = OTHER; note = 2'-O-methyladenosine
ttagcaacgtccagtccaaga

SEQ ID NO: 432 - RNA, 21 nt, synthetic construct
  source 1..21: mol_type = other RNA
  modified_base 1: mod_base = OTHER; note = 2'-O-methyluridine-3'-phosphorothioate
  modified_base 2: mod_base = OTHER; note = 2'-O-methyladenosine-3'-phosphorothioate
  modified_base 3: mod_base = OTHER; note = 2'-O-methylguanosine-3'-phosphate
  modified_base 4: mod_base = OTHER; note = 2'-O-methylcytidine-3'-phosphate
  modified_base 5: mod_base = OTHER; note = 2'-O-methyladenosine-3'-phosphate
  modified_base 6: mod_base = OTHER; note = 2'-O-hexadecyl-adenosine-3'-phosphate
  modified_base 7: mod_base = OTHER; note = 2'-O-methylcytidine-3'-phosphate
  modified_base 8: mod_base = OTHER; note = 2'-O-methylguanosine-3'-phosphate
  modified_base 9: mod_base = OTHER; note = 2'-deoxy-2'-fluorouridine-3'-phosphate
  modified_base 10: mod_base = OTHER; note = 2'-deoxy-2'-fluorocytidine-3'-phosphate
  modified_base 11: mod_base = OTHER; note = 2'-deoxy-2'-fluorocytidine-3'-phosphate
  modified_base 12: mod_base = OTHER; note = 2'-O-methyladenosine-3'-phosphate
  modified_base 13: mod_base = OTHER; note = 2'-O-methylguanosine-3'-phosphate
  modified_base 14: mod_base = OTHER; note = 2'-O-methyluridine-3'-phosphate
  modified_base 15: mod_base = OTHER; note = 2'-O-methylcytidine-3'-phosphate
  modified_base 16: mod_base = OTHER; note = 2'-O-methylcytidine-3'-phosphate
  modified_base 17: mod_base = OTHER; note = 2'-O-methyladenosine-3'-phosphate
  modified_base 18: mod_base = OTHER; note = 2'-O-methyladenosine-3'-phosphate
  modified_base 19: mod_base = OTHER; note = 2'-O-methylguanosine-3'-phosphorothioate
  modified_base 20: mod_base = OTHER; note = 2'-O-methyluridine-3'-phosphorothioate
  modified_base 21: mod_base = OTHER; note = 2'-O-methyladenosine
tagcaacgtccagtccaagta

SEQ ID NO: 433 - RNA, 21 nt, synthetic construct
  source 1..21: mol_type = other RNA
  modified_base 1: mod_base = OTHER; note = 2'-O-methyladenosine-3'-phosphorothioate
  modified_base 2: mod_base = OTHER; note = 2'-O-methylguanosine-3'-phosphorothioate
  modified_base 3: mod_base = OTHER; note = 2'-O-methylcytidine-3'-phosphate
  modified_base 4: mod_base = OTHER; note = 2'-O-methyladenosine-3'-phosphate
  modified_base 5: mod_base = OTHER; note = 2'-O-methyladenosine-3'-phosphate
  modified_base 6: mod_base = OTHER; note = 2'-O-hexadecyl-cytidine-3'-phosphate
  modified_base 7: mod_base = OTHER; note = 2'-O-methylguanosine-3'-phosphate
  modified_base 8: mod_base = OTHER; note = 2'-O-methyluridine-3'-phosphate
  modified_base 9: mod_base = OTHER; note = 2'-deoxy-2'-fluorocytidine-3'-phosphate
  modified_base 10: mod_base = OTHER; note = 2'-deoxy-2'-fluorocytidine-3'-phosphate
  modified_base 11: mod_base = OTHER; note = 2'-deoxy-2'-fluoroadenosine-3'-phosphate
  modified_base 12: mod_base = OTHER; note = 2'-O-methylguanosine-3'-phosphate
  modified_base 13: mod_base = OTHER; note = 2'-O-methyluridine-3'-phosphate
  modified_base 14: mod_base = OTHER; note = 2'-O-methylcytidine-3'-phosphate
  modified_base 15: mod_base = OTHER; note = 2'-O-methylcytidine-3'-phosphate
  modified_base 16: mod_base = OTHER; note = 2'-O-methyladenosine-3'-phosphate
  modified_base 17: mod_base = OTHER; note = 2'-O-methyladenosine-3'-phosphate
  modified_base 18: mod_base = OTHER; note = 2'-O-methylguanosine-3'-phosphate
  modified_base 19: mod_base = OTHER; note = 2'-O-methyluridine-3'-phosphorothioate
  modified_base 20: mod_base = OTHER; note = 2'-O-methylguanosine-3'-phosphorothioate
  modified_base 21: mod_base = OTHER; note = 2'-O-methyladenosine
agcaacgtccagtccaagtga

SEQ ID NO: 434 - RNA, 21 nt, synthetic construct
  source 1..21: mol_type = other RNA
  modified_base 1: mod_base = OTHER; note = 2'-O-methyladenosine-3'-phosphorothioate
  modified_base 2: mod_base = OTHER; note = 2'-O-methylcytidine-3'-phosphorothioate
  modified_base 3: mod_base = OTHER; note = 2'-O-methylguanosine-3'-phosphate
  modified_base 4: mod_base = OTHER; note = 2'-O-methyluridine-3'-phosphate
  modified_base 5: mod_base = OTHER; note = 2'-O-methylcytidine-3'-phosphate
  modified_base 6: mod_base = OTHER; note = 2'-O-hexadecyl-cytidine-3'-phosphate
  modified_base 7: mod_base = OTHER; note = 2'-O-methyladenosine-3'-phosphate
  modified_base 8: mod_base = OTHER; note = 2'-O-methylguanosine-3'-phosphate
  modified_base 9: mod_base = OTHER; note = 2'-deoxy-2'-fluorouridine-3'-phosphate
  modified_base 10: mod_base = OTHER; note = 2'-deoxy-2'-fluorocytidine-3'-phosphate
  modified_base 11: mod_base = OTHER; note = 2'-deoxy-2'-fluorocytidine-3'-phosphate
  modified_base 12: mod_base = OTHER; note = 2'-O-methyladenosine-3'-phosphate
  modified_base 13: mod_base = OTHER; note = 2'-O-methyladenosine-3'-phosphate
  modified_base 14: mod_base = OTHER; note = 2'-O-methylguanosine-3'-phosphate
  modified_base 15: mod_base = OTHER; note = 2'-O-methyluridine-3'-phosphate
  modified_base 16: mod_base = OTHER; note = 2'-O-methylguanosine-3'-phosphate
  modified_base 17: mod_base = OTHER; note = 2'-O-methyluridine-3'-phosphate
  modified_base 18: mod_base = OTHER; note = 2'-O-methylguanosine-3'-phosphate
  modified_base 19: mod_base = OTHER; note = 2'-O-methylguanosine-3'-phosphorothioate
  modified_base 20: mod_base = OTHER; note = 2'-O-methylcytidine-3'-phosphorothioate
  modified_base 21: mod_base = OTHER; note = 2'-O-methyladenosine
acgtccagtccaagtgtggca

SEQ ID NO: 435 - RNA, 21 nt, synthetic construct
  source 1..21: mol_type = other RNA
  modified_base 1: mod_base = OTHER; note = 2'-O-methylcytidine-3'-phosphorothioate
  modified_base 2: mod_base = OTHER; note = 2'-O-methylguanosine-3'-phosphorothioate
  modified_base 3: mod_base = OTHER; note = 2'-O-methyluridine-3'-phosphate
  modified_base 4: mod_base = OTHER; note = 2'-O-methylcytidine-3'-phosphate
  modified_base 5: mod_base = OTHER; note = 2'-O-methylcytidine-3'-phosphate
  modified_base 6: mod_base = OTHER; note = 2'-O-hexadecyl-adenosine-3'-phosphate
  modified_base 7: mod_base = OTHER; note = 2'-O-methylguanosine-3'-phosphate
  modified_base 8: mod_base = OTHER; note = 2'-O-methyluridine-3'-phosphate
  modified_base 9: mod_base = OTHER; note = 2'-deoxy-2'-fluorocytidine-3'-phosphate
  modified_base 10: mod_base = OTHER; note = 2'-deoxy-2'-fluorocytidine-3'-phosphate
  modified_base 11: mod_base = OTHER; note = 2'-deoxy-2'-fluoroadenosine-3'-phosphate
  modified_base 12: mod_base = OTHER; note = 2'-O-methyladenosine-3'-phosphate
  modified_base 13: mod_base = OTHER; note = 2'-O-methylguanosine-3'-phosphate
  modified_base 14: mod_base = OTHER; note = 2'-O-methyluridine-3'-phosphate
  modified_base 15: mod_base = OTHER; note = 2'-O-methylguanosine-3'-phosphate
  modified_base 16: mod_base = OTHER; note = 2'-O-methyluridine-3'-phosphate
  modified_base 17: mod_base = OTHER; note = 2'-O-methylguanosine-3'-phosphate
  modified_base 18: mod_base = OTHER; note = 2'-O-methylguanosine-3'-phosphate
  modified_base 19: mod_base = OTHER; note = 2'-O-methylcytidine-3'-phosphorothioate
  modified_base 20: mod_base = OTHER; note = 2'-O-methyluridine-3'-phosphorothioate
  modified_base 21: mod_base = OTHER; note = 2'-O-methyladenosine
cgtccagtccaagtgtggcta

SEQ ID NO: 436 - RNA, 21 nt, synthetic construct
  source 1..21: mol_type = other RNA
  modified_base 1: mod_base = OTHER; note = 2'-O-methylguanosine-3'-phosphorothioate
  modified_base 2: mod_base = OTHER; note = 2'-O-methyluridine-3'-phosphorothioate
  modified_base 3: mod_base = OTHER; note = 2'-O-methylcytidine-3'-phosphate
  modified_base 4: mod_base = OTHER; note = 2'-O-methylcytidine-3'-phosphate
  modified_base 5: mod_base = OTHER; note = 2'-O-methyladenosine-3'-phosphate
  modified_base 6: mod_base = OTHER; note = 2'-O-hexadecyl-guanosine-3'-phosphate
  modified_base 7: mod_base = OTHER; note = 2'-O-methyluridine-3'-phosphate
  modified_base 8: mod_base = OTHER; note = 2'-O-methylcytidine-3'-phosphate
  modified_base 9: mod_base = OTHER; note = 2'-deoxy-2'-fluorocytidine-3'-phosphate
  modified_base 10: mod_base = OTHER; note = 2'-deoxy-2'-fluoroadenosine-3'-phosphate
  modified_base 11: mod_base = OTHER; note = 2'-deoxy-2'-fluoroadenosine-3'-phosphate
  modified_base 12: mod_base = OTHER; note = 2'-O-methylguanosine-3'-phosphate
  modified_base 13: mod_base = OTHER; note = 2'-O-methyluridine-3'-phosphate
  modified_base 14: mod_base = OTHER; note = 2'-O-methylguanosine-3'-phosphate
  modified_base 15: mod_base = OTHER; note = 2'-O-methyluridine-3'-phosphate
  modified_base 16: mod_base = OTHER; note = 2'-O-methylguanosine-3'-phosphate
  modified_base 17: mod_base = OTHER; note = 2'-O-methylguanosine-3'-phosphate
  modified_base 18: mod_base = OTHER; note = 2'-O-methylcytidine-3'-phosphate
  modified_base 19: mod_base = OTHER; note = 2'-O-methyluridine-3'-phosphorothioate
  modified_base 20: mod_base = OTHER; note = 2'-O-methylcytidine-3'-phosphorothioate
  modified_base 21: mod_base = OTHER; note = 2'-O-methyladenosine
gtccagtccaagtgtggctca

SEQ ID NO: 437 - RNA, 21 nt, synthetic construct
  source 1..21: mol_type = other RNA
  modified_base 1: mod_base = OTHER; note = 2'-O-methyluridine-3'-phosphorothioate
  modified_base 2: mod_base = OTHER; note = 2'-O-methylcytidine-3'-phosphorothioate
  modified_base 3: mod_base = OTHER; note = 2'-O-methylcytidine-3'-phosphate
  modified_base 4: mod_base = OTHER; note = 2'-O-methyladenosine-3'-phosphate
  modified_base 5: mod_base = OTHER; note = 2'-O-methylguanosine-3'-phosphate
  modified_base 6: mod_base = OTHER; note = 2'-O-hexadecyl-uridine-3'-phosphate
  modified_base 7: mod_base = OTHER; note = 2'-O-methylcytidine-3'-phosphate
  modified_base 8: mod_base = OTHER; note = 2'-O-methylcytidine-3'-phosphate
  modified_base 9: mod_base = OTHER; note = 2'-deoxy-2'-fluoroadenosine-3'-phosphate
  modified_base 10: mod_base = OTHER; note = 2'-deoxy-2'-fluoroadenosine-3'-phosphate
  modified_base 11: mod_base = OTHER; note = 2'-deoxy-2'-fluoroguanosine-3'-phosphate
  modified_base 12: mod_base = OTHER; note = 2'-O-methyluridine-3'-phosphate
  modified_base 13: mod_base = OTHER; note = 2'-O-methylguanosine-3'-phosphate
  modified_base 14: mod_base = OTHER; note = 2'-O-methyluridine-3'-phosphate
  modified_base 15: mod_base = OTHER; note = 2'-O-methylguanosine-3'-phosphate
  modified_base 16: mod_base = OTHER; note = 2'-O-methylguanosine-3'-phosphate
  modified_base 17: mod_base = OTHER; note = 2'-O-methylcytidine-3'-phosphate
  modified_base 18: mod_base = OTHER; note = 2'-O-methyluridine-3'-phosphate
  modified_base 19: mod_base = OTHER; note = 2'-O-methylcytidine-3'-phosphorothioate
  modified_base 20: mod_base = OTHER; note = 2'-O-methyladenosine-3'-phosphorothioate
  modified_base 21: mod_base = OTHER; note = 2'-O-methyladenosine
tccagtccaagtgtggctcaa

SEQ ID NO: 438 - RNA, 21 nt, synthetic construct
  source 1..21: mol_type = other RNA
  modified_base 1: mod_base = OTHER; note = 2'-O-methylcytidine-3'-phosphorothioate
  modified_base 2: mod_base = OTHER; note = 2'-O-methylcytidine-3'-phosphorothioate
  modified_base 3: mod_base = OTHER; note = 2'-O-methyladenosine-3'-phosphate
  modified_base 4: mod_base = OTHER; note = 2'-O-methylguanosine-3'-phosphate
  modified_base 5: mod_base = OTHER; note = 2'-O-methyluridine-3'-phosphate
  modified_base 6: mod_base = OTHER; note = 2'-O-hexadecyl-cytidine-3'-phosphate
  modified_base 7: mod_base = OTHER; note = 2'-O-methylcytidine-3'-phosphate
  modified_base 8: mod_base = OTHER; note = 2'-O-methyladenosine-3'-phosphate
  modified_base 9: mod_base = OTHER; note = 2'-deoxy-2'-fluoroadenosine-3'-phosphate
  modified_base 10: mod_base = OTHER; note = 2'-deoxy-2'-fluoroguanosine-3'-phosphate
  modified_base 11: mod_base = OTHER; note = 2'-deoxy-2'-fluorouridine-3'-phosphate
  modified_base 12: mod_base = OTHER; note = 2'-O-methylguanosine-3'-phosphate
  modified_base 13: mod_base = OTHER; note = 2'-O-methyluridine-3'-phosphate
  modified_base 14: mod_base = OTHER; note = 2'-O-methylguanosine-3'-phosphate
  modified_base 15: mod_base = OTHER; note = 2'-O-methylguanosine-3'-phosphate
  modified_base 16: mod_base = OTHER; note = 2'-O-methylcytidine-3'-phosphate
  modified_base 17: mod_base = OTHER; note = 2'-O-methyluridine-3'-phosphate
  modified_base 18: mod_base = OTHER; note = 2'-O-methylcytidine-3'-phosphate
  modified_base 19: mod_base = OTHER; note = 2'-O-methyladenosine-3'-phosphorothioate
  modified_base 20: mod_base = OTHER; note = 2'-O-methyladenosine-3'-phosphorothioate
  modified_base 21: mod_base = OTHER; note = 2'-O-methyladenosine
ccagtccaagtgtggctcaaa

SEQ ID NO: 439 - RNA, 21 nt, synthetic construct
  source 1..21: mol_type = other RNA
  modified_base 1: mod_base = OTHER; note = 2'-O-methylcytidine-3'-phosphorothioate
  modified_base 2: mod_base = OTHER; note = 2'-O-methyladenosine-3'-phosphorothioate
  modified_base 3: mod_base = OTHER; note = 2'-O-methylguanosine-3'-phosphate
  modified_base 4: mod_base = OTHER; note = 2'-O-methyluridine-3'-phosphate
  modified_base 5: mod_base = OTHER; note = 2'-O-methylcytidine-3'-phosphate
  modified_base 6: mod_base = OTHER; note = 2'-O-hexadecyl-cytidine-3'-phosphate
  modified_base 7: mod_base = OTHER; note = 2'-O-methyladenosine-3'-phosphate
  modified_base 8: mod_base = OTHER; note = 2'-O-methyladenosine-3'-phosphate
  modified_base 9: mod_base = OTHER; note = 2'-deoxy-2'-fluoroguanosine-3'-phosphate
  modified_base 10: mod_base = OTHER; note = 2'-deoxy-2'-fluorouridine-3'-phosphate
  modified_base 11: mod_base = OTHER; note = 2'-deoxy-2'-fluoroguanosine-3'-phosphate
  modified_base 12: mod_base = OTHER; note = 2'-O-methyluridine-3'-phosphate
  modified_base 13: mod_base = OTHER; note = 2'-O-methylguanosine-3'-phosphate
  modified_base 14: mod_base = OTHER; note = 2'-O-methylguanosine-3'-phosphate
  modified_base 15: mod_base = OTHER; note = 2'-O-methylcytidine-3'-phosphate
  modified_base 16: mod_base = OTHER; note = 2'-O-methyluridine-3'-phosphate
  modified_base 17: mod_base = OTHER; note = 2'-O-methylcytidine-3'-phosphate
  modified_base 18: mod_base = OTHER; note = 2'-O-methyladenosine-3'-phosphate
  modified_base 19: mod_base = OTHER; note = 2'-O-methyladenosine-3'-phosphorothioate
  modified_base 20: mod_base = OTHER; note = 2'-O-methyladenosine-3'-phosphorothioate
  modified_base 21: mod_base = OTHER; note = 2'-O-methyladenosine
cagtccaagtgtggctcaaaa

SEQ ID NO: 440 - RNA, 21 nt, synthetic construct
  source 1..21: mol_type = other RNA
  modified_base 1: mod_base = OTHER; note = 2'-O-methyladenosine-3'-phosphorothioate
  modified_base 2: mod_base = OTHER; note = 2'-O-methylguanosine-3'-phosphorothioate
  modified_base 3: mod_base = OTHER; note = 2'-O-methyluridine-3'-phosphate
  modified_base 4: mod_base = OTHER; note = 2'-O-methylcytidine-3'-phosphate
  modified_base 5: mod_base = OTHER; note = 2'-O-methylcytidine-3'-phosphate
  modified_base 6: mod_base = OTHER; note = 2'-O-hexadecyl-adenosine-3'-phosphate
  modified_base 7: mod_base = OTHER; note = 2'-O-methyladenosine-3'-phosphate
  modified_base 8: mod_base = OTHER; note = 2'-O-methylguanosine-3'-phosphate
  modified_base 9: mod_base = OTHER; note = 2'-deoxy-2'-fluorouridine-3'-phosphate
  modified_base 10: mod_base = OTHER; note = 2'-deoxy-2'-fluoroguanosine-3'-phosphate
  modified_base 11: mod_base = OTHER; note = 2'-deoxy-2'-fluorouridine-3'-phosphate
  modified_base 12: mod_base = OTHER; note = 2'-O-methylguanosine-3'-phosphate
  modified_base 13: mod_base = OTHER; note = 2'-O-methylguanosine-3'-phosphate
  modified_base 14: mod_base = OTHER; note = 2'-O-methylcytidine-3'-phosphate
  modified_base 15: mod_base = OTHER; note = 2'-O-methyluridine-3'-phosphate
  modified_base 16: mod_base = OTHER; note = 2'-O-methylcytidine-3'-phosphate
  modified_base 17: mod_base = OTHER; note = 2'-O-methyladenosine-3'-phosphate
  modified_base 18: mod_base = OTHER; note = 2'-O-methyladenosine-3'-phosphate
  modified_base 19: mod_base = OTHER; note = 2'-O-methyladenosine-3'-phosphorothioate
  modified_base 20: mod_base = OTHER; note = 2'-O-methylguanosine-3'-phosphorothioate
  modified_base 21: mod_base = OTHER; note = 2'-O-methyladenosine
agtccaagtgtggctcaaaga

SEQ ID NO: 441 - RNA, 21 nt, synthetic construct
  source 1..21: mol_type = other RNA
  modified_base 1: mod_base = OTHER; note = 2'-O-methylcytidine-3'-phosphorothioate
  modified_base 2: mod_base = OTHER; note = 2'-O-methyladenosine-3'-phosphorothioate
  modified_base 3: mod_base = OTHER; note = 2'-O-methyladenosine-3'-phosphate
  modified_base 4: mod_base = OTHER; note = 2'-O-methylguanosine-3'-phosphate
  modified_base 5: mod_base = OTHER; note = 2'-O-methyluridine-3'-phosphate
  modified_base 6: mod_base = OTHER; note = 2'-O-hexadecyl-guanosine-3'-phosphate
  modified_base 7: mod_base = OTHER; note = 2'-O-methyluridine-3'-phosphate
  modified_base 8: mod_base = OTHER; note = 2'-O-methylguanosine-3'-phosphate
  modified_base 9: mod_base = OTHER; note = 2'-deoxy-2'-fluoroguanosine-3'-phosphate
  modified_base 10: mod_base = OTHER; note = 2'-deoxy-2'-fluorocytidine-3'-phosphate
  modified_base 11: mod_base = OTHER; note = 2'-deoxy-2'-fluorouridine-3'-phosphate
  modified_base 12: mod_base = OTHER; note = 2'-O-methylcytidine-3'-phosphate
  modified_base 13: mod_base = OTHER; note = 2'-O-methyladenosine-3'-phosphate
  modified_base 14: mod_base = OTHER; note = 2'-O-methyladenosine-3'-phosphate
  modified_base 15: mod_base = OTHER; note = 2'-O-methyladenosine-3'-phosphate
  modified_base 16: mod_base = OTHER; note = 2'-O-methylguanosine-3'-phosphate
  modified_base 17: mod_base = OTHER; note = 2'-O-methylguanosine-3'-phosphate
  modified_base 18: mod_base = OTHER; note = 2'-O-methyladenosine-3'-phosphate
  modified_base 19: mod_base = OTHER; note = 2'-O-methyluridine-3'-phosphorothioate
  modified_base 20: mod_base = OTHER; note = 2'-O-methyladenosine-3'-phosphorothioate
  modified_base 21: mod_base = OTHER; note = 2'-O-methyladenosine
caagtgtggctcaaaggataa

SEQ ID NO: 442 - RNA, 21 nt, synthetic construct
  source 1..21: mol_type = other RNA
  modified_base 1: mod_base = OTHER; note = 2'-O-methyladenosine-3'-phosphorothioate
  modified_base 2: mod_base = OTHER; note = 2'-O-methyladenosine-3'-phosphorothioate
  modified_base 3: mod_base = OTHER; note = 2'-O-methylguanosine-3'-phosphate
  modified_base 4: mod_base = OTHER; note = 2'-O-methyluridine-3'-phosphate
  modified_base 5: mod_base = OTHER; note = 2'-O-methylguanosine-3'-phosphate
  modified_base 6: mod_base = OTHER; note = 2'-O-hexadecyl-uridine-3'-phosphate
  modified_base 7: mod_base = OTHER; note = 2'-O-methylguanosine-3'-phosphate
  modified_base 8: mod_base = OTHER; note = 2'-O-methylguanosine-3'-phosphate
  modified_base 9: mod_base = OTHER; note = 2'-deoxy-2'-fluorocytidine-3'-phosphate
  modified_base 10: mod_base = OTHER; note = 2'-deoxy-2'-fluorouridine-3'-phosphate
  modified_base 11: mod_base = OTHER; note = 2'-deoxy-2'-fluorocytidine-3'-phosphate
  modified_base 12: mod_base = OTHER; note = 2'-O-methyladenosine-3'-phosphate
  modified_base 13: mod_base = OTHER; note = 2'-O-methyladenosine-3'-phosphate
  modified_base 14: mod_base = OTHER; note = 2'-O-methyladenosine-3'-phosphate
  modified_base 15: mod_base = OTHER; note = 2'-O-methylguanosine-3'-phosphate
  modified_base 16: mod_base = OTHER; note = 2'-O-methylguanosine-3'-phosphate
  modified_base 17: mod_base = OTHER; note = 2'-O-methyladenosine-3'-phosphate
  modified_base 18: mod_base = OTHER; note = 2'-O-methyluridine-3'-phosphate
  modified_base 19: mod_base = OTHER; note = 2'-O-methyladenosine-3'-phosphorothioate
  modified_base 20: mod_base = OTHER; note = 2'-O-methyladenosine-3'-phosphorothioate
  modified_base 21: mod_base = OTHER; note = 2'-O-methyladenosine
aagtgtggctcaaaggataaa

SEQ ID NO: 443 - RNA, 21 nt, synthetic construct
  source 1..21: mol_type = other RNA
  modified_base 1: mod_base = OTHER; note = 2'-O-methyladenosine-3'-phosphorothioate
  modified_base 2: mod_base = OTHER; note = 2'-O-methylguanosine-3'-phosphorothioate
  modified_base 3: mod_base = OTHER; note = 2'-O-methyluridine-3'-phosphate
  modified_base 4: mod_base = OTHER; note = 2'-O-methylguanosine-3'-phosphate
  modified_base 5: mod_base = OTHER; note = 2'-O-methyluridine-3'-phosphate
  modified_base 6: mod_base = OTHER; note = 2'-O-hexadecyl-guanosine-3'-phosphate
  modified_base 7: mod_base = OTHER; note = 2'-O-methylguanosine-3'-phosphate
  modified_base 8: mod_base = OTHER; note = 2'-O-methylcytidine-3'-phosphate
  modified_base 9: mod_base = OTHER; note = 2'-deoxy-2'-fluorouridine-3'-phosphate
  modified_base 10: mod_base = OTHER; note = 2'-deoxy-2'-fluorocytidine-3'-phosphate
  modified_base 11: mod_base = OTHER; note = 2'-deoxy-2'-fluoroadenosine-3'-phosphate
  modified_base 12: mod_base = OTHER; note = 2'-O-methyladenosine-3'-phosphate
  modified_base 13: mod_base = OTHER; note = 2'-O-methyladenosine-3'-phosphate
  modified_base 14: mod_base = OTHER; note = 2'-O-methylguanosine-3'-phosphate
  modified_base 15: mod_base = OTHER; note = 2'-O-methylguanosine-3'-phosphate
  modified_base 16: mod_base = OTHER; note = 2'-O-methyladenosine-3'-phosphate
  modified_base 17: mod_base = OTHER; note = 2'-O-methyluridine-3'-phosphate
  modified_base 18: mod_base = OTHER; note = 2'-O-methyladenosine-3'-phosphate
  modified_base 19: mod_base = OTHER; note = 2'-O-methyladenosine-3'-phosphorothioate
  modified_base 20: mod_base = OTHER; note = 2'-O-methyluridine-3'-phosphorothioate
  modified_base 21: mod_base = OTHER; note = 2'-O-methyladenosine
agtgtggctcaaaggataata

SEQ ID NO: 444 - RNA, 21 nt, synthetic construct
  source 1..21: mol_type = other RNA
  modified_base 1: mod_base = OTHER; note = 2'-O-methylguanosine-3'-phosphorothioate
  modified_base 2: mod_base = OTHER; note = 2'-O-methyluridine-3'-phosphorothioate
  modified_base 3: mod_base = OTHER; note = 2'-O-methylguanosine-3'-phosphate
  modified_base 4: mod_base = OTHER; note = 2'-O-methyluridine-3'-phosphate
  modified_base 5: mod_base = OTHER; note = 2'-O-methylguanosine-3'-phosphate
  modified_base 6: mod_base = OTHER; note = 2'-O-hexadecyl-guanosine-3'-phosphate
  modified_base 7: mod_base = OTHER; note = 2'-O-methylcytidine-3'-phosphate
  modified_base 8: mod_base = OTHER; note = 2'-O-methyluridine-3'-phosphate
  modified_base 9: mod_base = OTHER; note = 2'-deoxy-2'-fluorocytidine-3'-phosphate
  modified_base 10: mod_base = OTHER; note = 2'-deoxy-2'-fluoroadenosine-3'-phosphate
  modified_base 11: mod_base = OTHER; note = 2'-deoxy-2'-fluoroadenosine-3'-phosphate
  modified_base 12: mod_base = OTHER; note = 2'-O-methyladenosine-3'-phosphate
  modified_base 13: mod_base = OTHER; note = 2'-O-methylguanosine-3'-phosphate
  modified_base 14: mod_base = OTHER; note = 2'-O-methylguanosine-3'-phosphate
  modified_base 15: mod_base = OTHER; note = 2'-O-methyladenosine-3'-phosphate
  modified_base 16: mod_base = OTHER; note = 2'-O-methyluridine-3'-phosphate
  modified_base 17: mod_base = OTHER; note = 2'-O-methyladenosine-3'-phosphate
  modified_base 18: mod_base = OTHER; note = 2'-O-methyladenosine-3'-phosphate
  modified_base 19: mod_base = OTHER; note = 2'-O-methyluridine-3'-phosphorothioate
  modified_base 20: mod_base = OTHER; note = 2'-O-methyladenosine-3'-phosphorothioate
  modified_base 21: mod_base = OTHER; note = 2'-O-methyladenosine
gtgtggctcaaaggataataa

SEQ ID NO: 445 - RNA, 21 nt, synthetic construct
  source 1..21: mol_type = other RNA
  modified_base 1: mod_base = OTHER; note = 2'-O-methyluridine-3'-phosphorothioate
  modified_base 2: mod_base = OTHER; note = 2'-O-methylguanosine-3'-phosphorothioate
  modified_base 3: mod_base = OTHER; note = 2'-O-methyluridine-3'-phosphate
  modified_base 4: mod_base = OTHER; note = 2'-O-methylguanosine-3'-phosphate
  modified_base 5: mod_base = OTHER; note = 2'-O-methylguanosine-3'-phosphate
  modified_base 6: mod_base = OTHER; note = 2'-O-hexadecyl-cytidine-3'-phosphate
  modified_base 7: mod_base = OTHER; note = 2'-O-methyluridine-3'-phosphate
  modified_base 8: mod_base = OTHER; note = 2'-O-methylcytidine-3'-phosphate
  modified_base 9: mod_base = OTHER; note = 2'-deoxy-2'-fluoroadenosine-3'-phosphate
  modified_base 10: mod_base = OTHER; note = 2'-deoxy-2'-fluoroadenosine-3'-phosphate
  modified_base 11: mod_base = OTHER; note = 2'-deoxy-2'-fluoroadenosine-3'-phosphate
  modified_base 12: mod_base = OTHER; note = 2'-O-methylguanosine-3'-phosphate
  modified_base 13: mod_base = OTHER; note = 2'-O-methylguanosine-3'-phosphate
  modified_base 14: mod_base = OTHER; note = 2'-O-methyladenosine-3'-phosphate
  modified_base 15: mod_base = OTHER; note = 2'-O-methyluridine-3'-phosphate
  modified_base 16: mod_base = OTHER; note = 2'-O-methyladenosine-3'-phosphate
  modified_base 17: mod_base = OTHER; note = 2'-O-methyladenosine-3'-phosphate
  modified_base 18: mod_base = OTHER; note = 2'-O-methyluridine-3'-phosphate
  modified_base 19: mod_base = OTHER; note = 2'-O-methyladenosine-3'-phosphorothioate
  modified_base 20: mod_base = OTHER; note = 2'-O-methyluridine-3'-phosphorothioate
  modified_base 21: mod_base = OTHER; note = 2'-O-methyladenosine
tgtggctcaaaggataatata

SEQ ID NO: 446 - RNA, 21 nt, synthetic construct
  source 1..21: mol_type = other RNA
  modified_base 1: mod_base = OTHER; note = 2'-O-methyluridine-3'-phosphorothioate
  modified_base 2: mod_base = OTHER; note = 2'-O-methylguanosine-3'-phosphorothioate
  modified_base 3: mod_base = OTHER; note = 2'-O-methylguanosine-3'-phosphate
  modified_base 4: mod_base = OTHER; note = 2'-O-methylcytidine-3'-phosphate
  modified_base 5: mod_base = OTHER; note = 2'-O-methyluridine-3'-phosphate
  modified_base 6: mod_base = OTHER; note = 2'-O-hexadecyl-cytidine-3'-phosphate
  modified_base 7: mod_base = OTHER; note = 2'-O-methyladenosine-3'-phosphate
  modified_base 8: mod_base = OTHER; note = 2'-O-methyladenosine-3'-phosphate
  modified_base 9: mod_base = OTHER; note = 2'-deoxy-2'-fluoroadenosine-3'-phosphate
  modified_base 10: mod_base = OTHER; note = 2'-deoxy-2'-fluoroguanosine-3'-phosphate
  modified_base 11: mod_base = OTHER; note = 2'-deoxy-2'-fluoroguanosine-3'-phosphate
  modified_base 12: mod_base = OTHER; note = 2'-O-methyladenosine-3'-phosphate
  modified_base 13: mod_base = OTHER; note = 2'-O-methyluridine-3'-phosphate
  modified_base 14: mod_base = OTHER; note = 2'-O-methyladenosine-3'-phosphate
  modified_base 15: mod_base = OTHER; note = 2'-O-methyladenosine-3'-phosphate
  modified_base 16: mod_base = OTHER; note = 2'-O-methyluridine-3'-phosphate
  modified_base 17: mod_base = OTHER; note = 2'-O-methyladenosine-3'-phosphate
  modified_base 18: mod_base = OTHER; note = 2'-O-methyluridine-3'-phosphate
  modified_base 19: mod_base = OTHER; note = 2'-O-methylcytidine-3'-phosphorothioate
  modified_base 20: mod_base = OTHER; note = 2'-O-methyladenosine-3'-phosphorothioate
  modified_base 21: mod_base = OTHER; note = 2'-O-methyladenosine
tggctcaaaggataatatcaa

SEQ ID NO: 447 - RNA, 21 nt, synthetic construct
  source 1..21: mol_type = other RNA
  modified_base 1: mod_base = OTHER; note = 2'-O-methylguanosine-3'-phosphorothioate
  modified_base 2: mod_base = OTHER; note = 2'-O-methylcytidine-3'-phosphorothioate
  modified_base 3: mod_base = OTHER; note = 2'-O-methyluridine-3'-phosphate
  modified_base 4: mod_base = OTHER; note = 2'-O-methylcytidine-3'-phosphate
  modified_base 5: mod_base = OTHER; note = 2'-O-methyladenosine-3'-phosphate
  modified_base 6: mod_base = OTHER; note = 2'-O-hexadecyl-adenosine-3'-phosphate
  modified_base 7: mod_base = OTHER; note = 2'-O-methyladenosine-3'-phosphate
  modified_base 8: mod_base = OTHER; note = 2'-O-methylguanosine-3'-phosphate
  modified_base 9: mod_base = OTHER; note = 2'-deoxy-2'-fluoroguanosine-3'-phosphate
  modified_base 10: mod_base = OTHER; note = 2'-deoxy-2'-fluoroadenosine-3'-phosphate
  modified_base 11: mod_base = OTHER; note = 2'-deoxy-2'-fluorouridine-3'-phosphate
  modified_base 12: mod_base = OTHER; note = 2'-O-methyladenosine-3'-phosphate
  modified_base 13: mod_base = OTHER; note = 2'-O-methyladenosine-3'-phosphate
  modified_base 14: mod_base = OTHER; note = 2'-O-methyluridine-3'-phosphate
  modified_base 15: mod_base = OTHER; note = 2'-O-methyladenosine-3'-phosphate
  modified_base 16: mod_base = OTHER; note = 2'-O-methyluridine-3'-phosphate
  modified_base 17: mod_base = OTHER; note = 2'-O-methylcytidine-3'-phosphate
  modified_base 18: mod_base = OTHER; note = 2'-O-methyladenosine-3'-phosphate
  modified_base 19: mod_base = OTHER; note = 2'-O-methyladenosine-3'-phosphorothioate
  modified_base 20: mod_base = OTHER; note = 2'-O-methyladenosine-3'-phosphorothioate
  modified_base 21: mod_base = OTHER; note = 2'-O-methyladenosine
gctcaaaggataatatcaaaa

SEQ ID NO: 448 - RNA, 21 nt, synthetic construct
  source 1..21: mol_type = other RNA
  modified_base 1: mod_base = OTHER; note = 2'-O-methylcytidine-3'-phosphorothioate
  modified_base 2: mod_base = OTHER; note = 2'-O-methyluridine-3'-phosphorothioate
  modified_base 3: mod_base = OTHER; note = 2'-O-methylcytidine-3'-phosphate
  modified_base 4: mod_base = OTHER; note = 2'-O-methyladenosine-3'-phosphate
  modified_base 5: mod_base = OTHER; note = 2'-O-methyladenosine-3'-phosphate
  modified_base 6: mod_base = OTHER; note = 2'-O-hexadecyl-adenosine-3'-phosphate
  modified_base 7: mod_base = OTHER; note = 2'-O-methylguanosine-3'-phosphate
  modified_base 8: mod_base = OTHER; note = 2'-O-methylguanosine-3'-phosphate
  modified_base 9: mod_base = OTHER; note = 2'-deoxy-2'-fluoroadenosine-3'-phosphate
  modified_base 10: mod_base = OTHER; note = 2'-deoxy-2'-fluorouridine-3'-phosphate
  modified_base 11: mod_base = OTHER; note = 2'-deoxy-2'-fluoroadenosine-3'-phosphate
  modified_base 12: mod_base = OTHER; note = 2'-O-methyladenosine-3'-phosphate
  modified_base 13: mod_base = OTHER; note = 2'-O-methyluridine-3'-phosphate
  modified_base 14: mod_base = OTHER; note = 2'-O-methyladenosine-3'-phosphate
  modified_base 15: mod_base = OTHER; note = 2'-O-methyluridine-3'-phosphate
  modified_base 16: mod_base = OTHER; note = 2'-O-methylcytidine-3'-phosphate
  modified_base 17: mod_base = OTHER; note = 2'-O-methyladenosine-3'-phosphate
  modified_base 18: mod_base = OTHER; note = 2'-O-methyladenosine-3'-phosphate
  modified_base 19: mod_base = OTHER; note = 2'-O-methyladenosine-3'-phosphorothioate
  modified_base 20: mod_base = OTHER; note = 2'-O-methylcytidine-3'-phosphorothioate
  modified_base 21: mod_base = OTHER; note = 2'-O-methyladenosine
ctcaaaggataatatcaaaca

SEQ ID NO: 449 - RNA, 21 nt, synthetic construct
  source 1..21: mol_type = other RNA
  modified_base 1: mod_base = OTHER; note = 2'-O-methyladenosine-3'-phosphorothioate
  modified_base 2: mod_base = OTHER; note = 2'-O-methyladenosine-3'-phosphorothioate
  modified_base 3: mod_base = OTHER; note = 2'-O-methyladenosine-3'-phosphate
  modified_base 4: mod_base = OTHER; note = 2'-O-methylguanosine-3'-phosphate
  modified_base 5: mod_base = OTHER; note = 2'-O-methylguanosine-3'-phosphate
  modified_base 6: mod_base = OTHER; note = 2'-O-hexadecyl-adenosine-3'-phosphate
  modified_base 7: mod_base = OTHER; note = 2'-O-methyluridine-3'-phosphate
  modified_base 8: mod_base = OTHER; note = 2'-O-methyladenosine-3'-phosphate
  modified_base 9: mod_base = OTHER; note = 2'-deoxy-2'-fluoroadenosine-3'-phosphate
  modified_base 10: mod_base = OTHER; note = 2'-deoxy-2'-fluorouridine-3'-phosphate
  modified_base 11: mod_base = OTHER; note = 2'-deoxy-2'-fluoroadenosine-3'-phosphate
  modified_base 12: mod_base = OTHER; note = 2'-O-methyluridine-3'-phosphate
  modified_base 13: mod_base = OTHER; note = 2'-O-methylcytidine-3'-phosphate
  modified_base 14: mod_base = OTHER; note = 2'-O-methyladenosine-3'-phosphate
  modified_base 15: mod_base = OTHER; note = 2'-O-methyladenosine-3'-phosphate
  modified_base 16: mod_base = OTHER; note = 2'-O-methyladenosine-3'-phosphate
  modified_base 17: mod_base = OTHER; note = 2'-O-methylcytidine-3'-phosphate
  modified_base 18: mod_base = OTHER; note = 2'-O-methyladenosine-3'-phosphate
  modified_base 19: mod_base = OTHER; note = 2'-O-methylcytidine-3'-phosphorothioate
  modified_base 20: mod_base = OTHER; note = 2'-O-methylguanosine-3'-phosphorothioate
  modified_base 21: mod_base = OTHER; note = 2'-O-methyladenosine
aaaggataatatcaaacacga

SEQ ID NO: 450 - RNA, 21 nt, synthetic construct
  source 1..21: mol_type = other RNA
  modified_base 1: mod_base = OTHER; note = 2'-O-methyladenosine-3'-phosphorothioate
  modified_base 2: mod_base = OTHER; note = 2'-O-methyladenosine-3'-phosphorothioate
  modified_base 3: mod_base = OTHER; note = 2'-O-methylguanosine-3'-phosphate
  modified_base 4: mod_base = OTHER; note = 2'-O-methylguanosine-3'-phosphate
  modified_base 5: mod_base = OTHER; note = 2'-O-methyladenosine-3'-phosphate
  modified_base 6: mod_base = OTHER; note = 2'-O-hexadecyl-uridine-3'-phosphate
  modified_base 7: mod_base = OTHER; note = 2'-O-methyladenosine-3'-phosphate
  modified_base 8: mod_base = OTHER; note = 2'-O-methyladenosine-3'-phosphate
  modified_base 9: mod_base = OTHER; note = 2'-deoxy-2'-fluorouridine-3'-phosphate
  modified_base 10: mod_base = OTHER; note = 2'-deoxy-2'-fluoroadenosine-3'-phosphate
  modified_base 11: mod_base = OTHER; note = 2'-deoxy-2'-fluorouridine-3'-phosphate
  modified_base 12: mod_base = OTHER; note = 2'-O-methylcytidine-3'-phosphate
  modified_base 13: mod_base = OTHER; note = 2'-O-methyladenosine-3'-phosphate
  modified_base 14: mod_base = OTHER; note = 2'-O-methyladenosine-3'-phosphate
  modified_base 15: mod_base = OTHER; note = 2'-O-methyladenosine-3'-phosphate
  modified_base 16: mod_base = OTHER; note = 2'-O-methylcytidine-3'-phosphate
  modified_base 17: mod_base = OTHER; note = 2'-O-methyladenosine-3'-phosphate
  modified_base 18: mod_base = OTHER; note = 2'-O-methylcytidine-3'-phosphate
  modified_base 19: mod_base = OTHER; note = 2'-O-methylguanosine-3'-phosphorothioate
  modified_base 20: mod_base = OTHER; note = 2'-O-methyluridine-3'-phosphorothioate
  modified_base 21: mod_base = OTHER; note = 2'-O-methyladenosine
aaggataatatcaaacacgta

SEQ ID NO: 451 - RNA, 21 nt, synthetic construct
  source 1..21: mol_type = other RNA
  modified_base 1: mod_base = OTHER; note = 2'-O-methyladenosine-3'-phosphorothioate
  modified_base 2: mod_base = OTHER; note = 2'-O-methylguanosine-3'-phosphorothioate
  modified_base 3: mod_base = OTHER; note = 2'-O-methylguanosine-3'-phosphate
  modified_base 4: mod_base = OTHER; note = 2'-O-methyladenosine-3'-phosphate
  modified_base 5: mod_base = OTHER; note = 2'-O-methyluridine-3'-phosphate
  modified_base 6: mod_base = OTHER; note = 2'-O-hexadecyl-adenosine-3'-phosphate
  modified_base 7: mod_base = OTHER; note = 2'-O-methyladenosine-3'-phosphate
  modified_base 8: mod_base = OTHER; note = 2'-O-methyluridine-3'-phosphate
  modified_base 9: mod_base = OTHER; note = 2'-deoxy-2'-fluoroadenosine-3'-phosphate
  modified_base 10: mod_base = OTHER; note = 2'-deoxy-2'-fluorouridine-3'-phosphate
  modified_base 11: mod_base = OTHER; note = 2'-deoxy-2'-fluorocytidine-3'-phosphate
  modified_base 12: mod_base = OTHER; note = 2'-O-methyladenosine-3'-phosphate
  modified_base 13: mod_base = OTHER; note = 2'-O-methyladenosine-3'-phosphate
  modified_base 14: mod_base = OTHER; note = 2'-O-methyladenosine-3'-phosphate
  modified_base 15: mod_base = OTHER; note = 2'-O-methylcytidine-3'-phosphate
  modified_base 16: mod_base = OTHER; note = 2'-O-methyladenosine-3'-phosphate
  modified_base 17: mod_base = OTHER; note = 2'-O-methylcytidine-3'-phosphate
  modified_base 18: mod_base = OTHER; note = 2'-O-methylguanosine-3'-phosphate
  modified_base 19: mod_base = OTHER; note = 2'-O-methyluridine-3'-phosphorothioate
  modified_base 20: mod_base = OTHER; note = 2'-O-methylcytidine-3'-phosphorothioate
  modified_base 21: mod_base = OTHER; note = 2'-O-methyladenosine
aggataatatcaaacacgtca

SEQ ID NO: 452 - RNA, 21 nt, synthetic construct
  source 1..21: mol_type = other RNA
  modified_base 1: mod_base = OTHER; note = 2'-O-methylguanosine-3'-phosphorothioate
  modified_base 2: mod_base = OTHER; note = 2'-O-methyladenosine-3'-phosphorothioate
  modified_base 3: mod_base = OTHER; note = 2'-O-methyluridine-3'-phosphate
  modified_base 4: mod_base = OTHER; note = 2'-O-methyladenosine-3'-phosphate
  modified_base 5: mod_base = OTHER; note = 2'-O-methyladenosine-3'-phosphate
  modified_base 6: mod_base = OTHER; note = 2'-O-hexadecyl-uridine-3'-phosphate
  modified_base 7: mod_base = OTHER; note = 2'-O-methyladenosine-3'-phosphate
  modified_base 8: mod_base = OTHER; note = 2'-O-methyluridine-3'-phosphate
  modified_base 9: mod_base = OTHER; note = 2'-deoxy-2'-fluorocytidine-3'-phosphate
  modified_base 10: mod_base = OTHER; note = 2'-deoxy-2'-fluoroadenosine-3'-phosphate
  modified_base 11: mod_base = OTHER; note = 2'-deoxy-2'-fluoroadenosine-3'-phosphate
  modified_base 12: mod_base = OTHER; note = 2'-O-methyladenosine-3'-phosphate
  modified_base 13: mod_base = OTHER; note = 2'-O-methylcytidine-3'-phosphate
  modified_base 14: mod_base = OTHER; note = 2'-O-methyladenosine-3'-phosphate
  modified_base 15: mod_base = OTHER; note = 2'-O-methylcytidine-3'-phosphate
  modified_base 16: mod_base = OTHER; note = 2'-O-methylguanosine-3'-phosphate
  modified_base 17: mod_base = OTHER; note = 2'-O-methyluridine-3'-phosphate
  modified_base 18: mod_base = OTHER; note = 2'-O-methylcytidine-3'-phosphate
  modified_base 19: mod_base = OTHER; note = 2'-O-methylcytidine-3'-phosphorothioate
  modified_base 20: mod_base = OTHER; note = 2'-O-methylcytidine-3'-phosphorothioate
  modified_base 21: mod_base = OTHER; note = 2'-O-methyladenosine
gataatatcaaacacgtccca

SEQ ID NO: 453 - RNA, 21 nt, synthetic construct
  source 1..21: mol_type = other RNA
  modified_base 1: mod_base = OTHER; note = 2'-O-methyluridine-3'-phosphorothioate
  modified_base 2: mod_base = OTHER; note = 2'-O-methyladenosine-3'-phosphorothioate
  modified_base 3: mod_base = OTHER; note = 2'-O-methyladenosine-3'-phosphate
  modified_base 4: mod_base = OTHER; note = 2'-O-methyluridine-3'-phosphate
  modified_base 5: mod_base = OTHER; note = 2'-O-methyladenosine-3'-phosphate
  modified_base 6: mod_base = OTHER; note = 2'-O-hexadecyl-uridine-3'-phosphate
  modified_base 7: mod_base = OTHER; note = 2'-O-methylcytidine-3'-phosphate
  modified_base 8: mod_base = OTHER; note = 2'-O-methyladenosine-3'-phosphate
  modified_base 9: mod_base = OTHER; note = 2'-deoxy-2'-fluoroadenosine-3'-phosphate
  modified_base 10: mod_base = OTHER; note = 2'-deoxy-2'-fluoroadenosine-3'-phosphate
  modified_base 11: mod_base = OTHER; note = 2'-deoxy-2'-fluorocytidine-3'-phosphate
  modified_base 12: mod_base = OTHER; note = 2'-O-methyladenosine-3'-phosphate
  modified_base 13: mod_base = OTHER; note = 2'-O-methylcytidine-3'-phosphate
  modified_base 14: mod_base = OTHER; note = 2'-O-methylguanosine-3'-phosphate
  modified_base 15: mod_base = OTHER; note = 2'-O-methyluridine-3'-phosphate
  modified_base 16: mod_base = OTHER; note = 2'-O-methylcytidine-3'-phosphate
  modified_base 17: mod_base = OTHER; note = 2'-O-methylcytidine-3'-phosphate
  modified_base 18: mod_base = OTHER; note = 2'-O-methylcytidine-3'-phosphate
  modified_base 19: mod_base = OTHER; note = 2'-O-methylguanosine-3'-phosphorothioate
  modified_base 20: mod_base = OTHER; note = 2'-O-methylguanosine-3'-phosphorothioate
  modified_base 21: mod_base = OTHER; note = 2'-O-methyladenosine
taatatcaaacacgtcccgga

SEQ ID NO: 454 - RNA, 21 nt, synthetic construct
  source 1..21: mol_type = other RNA
  modified_base 1: mod_base = OTHER; note = 2'-O-methyladenosine-3'-phosphorothioate
  modified_base 2: mod_base = OTHER; note = 2'-O-methyluridine-3'-phosphorothioate
  modified_base 3: mod_base = OTHER; note = 2'-O-methyladenosine-3'-phosphate
  modified_base 4: mod_base = OTHER; note = 2'-O-methyluridine-3'-phosphate
  modified_base 5: mod_base = OTHER; note = 2'-O-methylcytidine-3'-phosphate
  modified_base 6: mod_base = OTHER; note = 2'-O-hexadecyl-adenosine-3'-phosphate
  modified_base 7: mod_base = OTHER; note = 2'-O-methyladenosine-3'-phosphate
  modified_base 8: mod_base = OTHER; note = 2'-O-methyladenosine-3'-phosphate
  modified_base 9: mod_base = OTHER; note = 2'-deoxy-2'-fluorocytidine-3'-phosphate
  modified_base 10: mod_base = OTHER; note = 2'-deoxy-2'-fluoroadenosine-3'-phosphate
  modified_base 11: mod_base = OTHER; note = 2'-deoxy-2'-fluorocytidine-3'-phosphate
  modified_base 12: mod_base = OTHER; note = 2'-O-methylguanosine-3'-phosphate
  modified_base 13: mod_base = OTHER; note = 2'-O-methyluridine-3'-phosphate
  modified_base 14: mod_base = OTHER; note = 2'-O-methylcytidine-3'-phosphate
  modified_base 15: mod_base = OTHER; note = 2'-O-methylcytidine-3'-phosphate
  modified_base 16: mod_base = OTHER; note = 2'-O-methylcytidine-3'-phosphate
  modified_base 17: mod_base = OTHER; note = 2'-O-methylguanosine-3'-phosphate
  modified_base 18: mod_base = OTHER; note = 2'-O-methylguanosine-3'-phosphate
  modified_base 19: mod_base = OTHER; note = 2'-O-methylguanosine-3'-phosphorothioate
  modified_base 20: mod_base = OTHER; note = 2'-O-methyladenosine-3'-phosphorothioate
  modified_base 21: mod_base = OTHER; note = 2'-O-methyladenosine
atatcaaacacgtcccgggaa

SEQ ID NO: 455 - RNA, 21 nt, synthetic construct
  source 1..21: mol_type = other RNA
  modified_base 1: mod_base = OTHER; note = 2'-O-methyluridine-3'-phosphorothioate
  modified_base 2: mod_base = OTHER; note = 2'-O-methylcytidine-3'-phosphorothioate
  modified_base 3: mod_base = OTHER; note = 2'-O-methyladenosine-3'-phosphate
  modified_base 4: mod_base = OTHER; note = 2'-O-methyladenosine-3'-phosphate
  modified_base 5: mod_base = OTHER; note = 2'-O-methyladenosine-3'-phosphate
  modified_base 6: mod_base = OTHER; note = 2'-O-hexadecyl-cytidine-3'-phosphate
  modified_base 7: mod_base = OTHER; note = 2'-O-methyladenosine-3'-phosphate
  modified_base 8: mod_base = OTHER; note = 2'-O-methylcytidine-3'-phosphate
  modified_base 9: mod_base = OTHER; note = 2'-deoxy-2'-fluoroguanosine-3'-phosphate
  modified_base 10: mod_base = OTHER; note = 2'-deoxy-2'-fluorouridine-3'-phosphate
  modified_base 11: mod_base = OTHER; note = 2'-deoxy-2'-fluorocytidine-3'-phosphate
  modified_base 12: mod_base = OTHER; note = 2'-O-methylcytidine-3'-phosphate
  modified_base 13: mod_base = OTHER; note = 2'-O-methylcytidine-3'-phosphate
  modified_base 14: mod_base = OTHER; note = 2'-O-methylguanosine-3'-phosphate
  modified_base 15: mod_base = OTHER; note = 2'-O-methylguanosine-3'-phosphate
  modified_base 16: mod_base = OTHER; note = 2'-O-methylguanosine-3'-phosphate
  modified_base 17: mod_base = OTHER; note = 2'-O-methyladenosine-3'-phosphate
  modified_base 18: mod_base = OTHER; note = 2'-O-methylguanosine-3'-phosphate
  modified_base 19: mod_base = OTHER; note = 2'-O-methylguanosine-3'-phosphorothioate
  modified_base 20: mod_base = OTHER; note = 2'-O-methylcytidine-3'-phosphorothioate
  modified_base 21: mod_base = OTHER; note = 2'-O-methyladenosine
tcaaacacgtcccgggaggca

SEQ ID NO: 456 - RNA, 21 nt, synthetic construct
  source 1..21: mol_type = other RNA
  modified_base 1: mod_base = OTHER; note = 2'-O-methylcytidine-3'-phosphorothioate
  modified_base 2: mod_base = OTHER; note = 2'-O-methyladenosine-3'-phosphorothioate
  modified_base 3: mod_base = OTHER; note = 2'-O-methyladenosine-3'-phosphate
  modified_base 4: mod_base = OTHER; note = 2'-O-methyladenosine-3'-phosphate
  modified_base 5: mod_base = OTHER; note = 2'-O-methylcytidine-3'-phosphate
  modified_base 6: mod_base = OTHER; note = 2'-O-hexadecyl-adenosine-3'-phosphate
  modified_base 7: mod_base = OTHER; note = 2'-O-methylcytidine-3'-phosphate
  modified_base 8: mod_base = OTHER; note = 2'-O-methylguanosine-3'-phosphate
  modified_base 9: mod_base = OTHER; note = 2'-deoxy-2'-fluorouridine-3'-phosphate
  modified_base 10: mod_base = OTHER; note = 2'-deoxy-2'-fluorocytidine-3'-phosphate
  modified_base 11: mod_base = OTHER; note = 2'-deoxy-2'-fluorocytidine-3'-phosphate
  modified_base 12: mod_base = OTHER; note = 2'-O-methylcytidine-3'-phosphate
  modified_base 13: mod_base = OTHER; note = 2'-O-methylguanosine-3'-phosphate
  modified_base 14: mod_base = OTHER; note = 2'-O-methylguanosine-3'-phosphate
  modified_base 15: mod_base = OTHER; note = 2'-O-methylguanosine-3'-phosphate
  modified_base 16: mod_base = OTHER; note = 2'-O-methyladenosine-3'-phosphate
  modified_base 17: mod_base = OTHER; note = 2'-O-methylguanosine-3'-phosphate
  modified_base 18: mod_base = OTHER; note = 2'-O-methylguanosine-3'-phosphate
  modified_base 19: mod_base = OTHER; note = 2'-O-methylcytidine-3'-phosphorothioate
  modified_base 20: mod_base = OTHER; note = 2'-O-methylguanosine-3'-phosphorothioate
  modified_base 21: mod_base = OTHER; note = 2'-O-methyladenosine
caaacacgtcccgggaggcga

SEQ ID NO: 457 - RNA, 21 nt, synthetic construct
  source 1..21: mol_type = other RNA
  modified_base 1: mod_base = OTHER; note = 2'-O-methyladenosine-3'-phosphorothioate
  modified_base 2: mod_base = OTHER; note = 2'-O-methyladenosine-3'-phosphorothioate
  modified_base 3: mod_base = OTHER; note = 2'-O-methyladenosine-3'-phosphate
  modified_base 4: mod_base = OTHER; note = 2'-O-methylcytidine-3'-phosphate
  modified_base 5: mod_base = OTHER; note = 2'-O-methyladenosine-3'-phosphate
  modified_base 6: mod_base = OTHER; note = 2'-O-hexadecyl-cytidine-3'-phosphate
  modified_base 7: mod_base = OTHER; note = 2'-O-methylguanosine-3'-phosphate
  modified_base 8: mod_base = OTHER; note = 2'-O-methyluridine-3'-phosphate
  modified_base 9: mod_base = OTHER; note = 2'-deoxy-2'-fluorocytidine-3'-phosphate
  modified_base 10: mod_base = OTHER; note = 2'-deoxy-2'-fluorocytidine-3'-phosphate
  modified_base 11: mod_base = OTHER; note = 2'-deoxy-2'-fluorocytidine-3'-phosphate
  modified_base 12: mod_base = OTHER; note = 2'-O-methylguanosine-3'-phosphate
  modified_base 13: mod_base = OTHER; note = 2'-O-methylguanosine-3'-phosphate
  modified_base 14: mod_base = OTHER; note = 2'-O-methylguanosine-3'-phosphate
  modified_base 15: mod_base = OTHER; note = 2'-O-methyladenosine-3'-phosphate
  modified_base 16: mod_base = OTHER; note = 2'-O-methylguanosine-3'-phosphate
  modified_base 17: mod_base = OTHER; note = 2'-O-methylguanosine-3'-phosphate
  modified_base 18: mod_base = OTHER; note = 2'-O-methylcytidine-3'-phosphate
  modified_base 19: mod_base = OTHER; note = 2'-O-methylguanosine-3'-phosphorothioate
  modified_base 20: mod_base = OTHER; note = 2'-O-methylguanosine-3'-phosphorothioate
  modified_base 21: mod_base = OTHER; note = 2'-O-methyladenosine
aaacacgtcccgggaggcgga

SEQ ID NO: 458 - RNA, 21 nt, synthetic construct
  source 1..21: mol_type = other RNA
  modified_base 1: mod_base = OTHER; note = 2'-O-methyladenosine-3'-phosphorothioate
  modified_base 2: mod_base = OTHER; note = 2'-O-methyladenosine-3'-phosphorothioate
  modified_base 3: mod_base = OTHER; note = 2'-O-methylcytidine-3'-phosphate
  modified_base 4: mod_base = OTHER; note = 2'-O-methyladenosine-3'-phosphate
  modified_base 5: mod_base = OTHER; note = 2'-O-methylcytidine-3'-phosphate
  modified_base 6: mod_base = OTHER; note = 2'-O-hexadecyl-guanosine-3'-phosphate
  modified_base 7: mod_base = OTHER; note = 2'-O-methyluridine-3'-phosphate
  modified_base 8: mod_base = OTHER; note = 2'-O-methylcytidine-3'-phosphate
  modified_base 9: mod_base = OTHER; note = 2'-deoxy-2'-fluorocytidine-3'-phosphate
  modified_base 10: mod_base = OTHER; note = 2'-deoxy-2'-fluorocytidine-3'-phosphate
  modified_base 11: mod_base = OTHER; note = 2'-deoxy-2'-fluoroguanosine-3'-phosphate
  modified_base 12: mod_base = OTHER; note = 2'-O-methylguanosine-3'-phosphate
  modified_base 13: mod_base = OTHER; note = 2'-O-methylguanosine-3'-phosphate
  modified_base 14: mod_base = OTHER; note = 2'-O-methyladenosine-3'-phosphate
  modified_base 15: mod_base = OTHER; note = 2'-O-methylguanosine-3'-phosphate
  modified_base 16: mod_base = OTHER; note = 2'-O-methylguanosine-3'-phosphate
  modified_base 17: mod_base = OTHER; note = 2'-O-methylcytidine-3'-phosphate
  modified_base 18: mod_base = OTHER; note = 2'-O-methylguanosine-3'-phosphate
  modified_base 19: mod_base = OTHER; note = 2'-O-methylguanosine-3'-phosphorothioate
  modified_base 20: mod_base = OTHER; note = 2'-O-methylcytidine-3'-phosphorothioate
  modified_base 21: mod_base = OTHER; note = 2'-O-methyladenosine
aacacgtcccgggaggcggca

SEQ ID NO: 459 - DNA, 23 bp, synthetic construct
  source 1..23: mol_type = other DNA
  modified_base 1: mod_base = OTHER; note = 2'-O-methyluridine-3'-phosphorothioate 5'-(E)-Vinylphosphonate
  modified_base 2: mod_base = OTHER; note = 2'-deoxy-2'-fluorocytidine-3'-phosphorothioate
  modified_base 3: mod_base = OTHER; note = 2'-O-methylcytidine-3'-phosphate
  modified_base 4: mod_base = OTHER; note = 2'-O-methylguanosine-3'-phosphate
  modified_base 6: mod_base = OTHER; note = 2'-O-methylguanosine-3'-phosphate
  modified_base 7: mod_base = OTHER; note = Adenosine-glycol nucleic acid (GNA), S-isomer
  modified_base 8: mod_base = OTHER; note = 2'-O-methylcytidine-3'-phosphate
  modified_base 9: mod_base = OTHER; note = 2'-O-methylguanosine-3'-phosphate
  modified_base 10: mod_base = OTHER; note = 2'-O-methyluridine-3'-phosphate
  modified_base 11: mod_base = OTHER; note = 2'-O-methylguanosine-3'-phosphate
  modified_base 12: mod_base = OTHER; note = 2'-O-methyluridine-3'-phosphate
  modified_base 13: mod_base = OTHER; note = 2'-O-methyluridine-3'-phosphate
  modified_base 14: mod_base = OTHER; note = 2'-deoxy-2'-fluorouridine-3'-phosphate
  modified_base 15: mod_base = OTHER; note = 2'-O-methylguanosine-3'-phosphate
  modified_base 16: mod_base = OTHER; note = 2'-deoxy-2'-fluoroadenosine-3'-phosphate
  modified_base 17: mod_base = OTHER; note = 2'-O-methyluridine-3'-phosphate
  modified_base 18: mod_base = OTHER; note = 2'-O-methyladenosine-3'-phosphate
  modified_base 19: mod_base = OTHER; note = 2'-O-methyluridine-3'-phosphate
  modified_base 20: mod_base = OTHER; note = 2'-O-methyluridine-3'-phosphate
  modified_base 21: mod_base = OTHER; note = 2'-O-methyladenosine-3'-phosphorothioate
  modified_base 22: mod_base = OTHER; note = 2'-O-methyluridine-3'-phosphorothioate
  modified_base 23: mod_base = OTHER; note = 2'-O-methylcytidine
  misc_feature 1..4: note = RNA
  misc_feature 6..23: note = RNA
  misc_feature 5: note = DNA
tccgggacgtgtttgatattatc

SEQ ID NO: 460 - DNA, 23 bp, synthetic construct
  source 1..23: mol_type = other DNA
  modified_base 1: mod_base = OTHER; note = 2'-O-methyluridine-3'-phosphorothioate 5'-(E)-Vinylphosphonate
  modified_base 2: mod_base = OTHER; note = 2'-deoxy-2'-fluorouridine-3'-phosphorothioate
  modified_base 3: mod_base = OTHER; note = 2'-O-methylcytidine-3'-phosphate
  modified_base 4: mod_base = OTHER; note = 2'-O-methylcytidine-3'-phosphate
  modified_base 6: mod_base = OTHER; note = 2'-O-methylguanosine-3'-phosphate
  modified_base 7: mod_base = OTHER; note = guanosine-2'-phosphate
  modified_base 8: mod_base = OTHER; note = 2'-O-methylguanosine-3'-phosphate
  modified_base 9: mod_base = OTHER; note = 2'-O-methyladenosine-3'-phosphate
  modified_base 10: mod_base = OTHER; note = 2'-O-methylcytidine-3'-phosphate
  modified_base 11: mod_base = OTHER; note = 2'-O-methylguanosine-3'-phosphate
  modified_base 12: mod_base = OTHER; note = 2'-O-methyluridine-3'-phosphate
  modified_base 13: mod_base = OTHER; note = 2'-O-methylguanosine-3'-phosphate
  modified_base 14: mod_base = OTHER; note = 2'-deoxy-2'-fluorouridine-3'-phosphate
  modified_base 15: mod_base = OTHER; note = 2'-O-methyluridine-3'-phosphate
  modified_base 16: mod_base = OTHER; note = 2'-deoxy-2'-fluorouridine-3'-phosphate
  modified_base 17: mod_base = OTHER; note = 2'-O-methylguanosine-3'-phosphate
  modified_base 18: mod_base = OTHER; note = 2'-O-methyladenosine-3'-phosphate
  modified_base 19: mod_base = OTHER; note = 2'-O-methyluridine-3'-phosphate
  modified_base 20: mod_base = OTHER; note = 2'-O-methyladenosine-3'-phosphate
  modified_base 21: mod_base = OTHER; note = 2'-O-methyluridine-3'-phosphorothioate
  modified_base 22: mod_base = OTHER; note = 2'-O-methyluridine-3'-phosphorothioate
  modified_base 23: mod_base = OTHER; note = 2'-O-methyladenosine
  misc_feature 1..4: note = RNA
  misc_feature 6..23: note = RNA
  misc_feature 5: note = DNA
ttcccgggacgtgtttgatatta

SEQ ID NO: 461 - DNA, 23 bp, synthetic construct
  source 1..23: mol_type = other DNA
  modified_base 1: mod_base = OTHER; note = 2'-O-methyluridine-3'-phosphorothioate 5'-(E)-Vinylphosphonate
  modified_base 2: mod_base = OTHER; note = 2'-deoxy-2'-fluoroguanosine-3'-phosphorothioate
  modified_base 3: mod_base = OTHER; note = 2'-O-methylcytidine-3'-phosphate
  modified_base 4: mod_base = OTHER; note = 2'-O-methylcytidine-3'-phosphate
  modified_base 6: mod_base = OTHER; note = 2'-O-methylcytidine-3'-phosphate
  modified_base 7: mod_base = OTHER; note = cytidine-2'-phosphate
  modified_base 8: mod_base = OTHER; note = 2'-O-methylcytidine-3'-phosphate
  modified_base 9: mod_base = OTHER; note = 2'-O-methylguanosine-3'-phosphate
  modified_base 10: mod_base = OTHER; note = 2'-O-methylguanosine-3'-phosphate
  modified_base 11: mod_base = OTHER; note = 2'-O-methylguanosine-3'-phosphate
  modified_base 12: mod_base = OTHER; note = 2'-O-methyladenosine-3'-phosphate
  modified_base 13: mod_base = OTHER; note = 2'-O-methylcytidine-3'-phosphate
  modified_base 14: mod_base = OTHER; note = 2'-deoxy-2'-fluoroguanosine-3'-phosphate
  modified_base 15: mod_base = OTHER; note = 2'-O-methyluridine-3'-phosphate
  modified_base 16: mod_base = OTHER; note = 2'-deoxy-2'-fluoroguanosine-3'-phosphate
  modified_base 17: mod_base = OTHER; note = 2'-O-methyluridine-3'-phosphate
  modified_base 18: mod_base = OTHER; note = 2'-O-methyluridine-3'-phosphate
  modified_base 19: mod_base = OTHER; note = 2'-O-methyluridine-3'-phosphate
  modified_base 20: mod_base = OTHER; note = 2'-O-methylguanosine-3'-phosphate
  modified_base 21: mod_base = OTHER; note = 2'-O-methyladenosine-3'-phosphorothioate
  modified_base 22: mod_base = OTHER; note = 2'-O-methyluridine-3'-phosphorothioate
  modified_base 23: mod_base = OTHER; note = 2'-O-methyladenosine
  misc_feature 1..4: note = RNA
  misc_feature 6..23: note = RNA
  misc_feature 5: note = DNA
tgcctcccgggacgtgtttgata

SEQ ID NO: 462 - DNA, 23 bp, synthetic construct
  source 1..23: mol_type = other DNA
  modified_base 1: mod_base = OTHER; note = 2'-O-methyluridine-3'-phosphorothioate 5'-(E)-Vinylphosphonate
  modified_base 2: mod_base = OTHER; note = 2'-deoxy-2'-fluorocytidine-3'-phosphorothioate
  modified_base 3: mod_base = OTHER; note = 2'-O-methylguanosine-3'-phosphate
  modified_base 4: mod_base = OTHER; note = 2'-O-methylcytidine-3'-phosphate
  modified_base 6: mod_base = OTHER; note = 2'-O-methyluridine-3'-phosphate
  modified_base 7: mod_base = OTHER; note = cytidine-2'-phosphate
  modified_base 8: mod_base = OTHER; note = 2'-O-methylcytidine-3'-phosphate
  modified_base 9: mod_base = OTHER; note = 2'-O-methylcytidine-3'-phosphate
  modified_base 10: mod_base = OTHER; note = 2'-O-methylguanosine-3'-phosphate
  modified_base 11: mod_base = OTHER; note = 2'-O-methylguanosine-3'-phosphate
  modified_base 12: mod_base = OTHER; note = 2'-O-methylguanosine-3'-phosphate
  modified_base 13: mod_base = OTHER; note = 2'-O-methyladenosine-3'-phosphate
  modified_base 14: mod_base = OTHER; note = 2'-deoxy-2'-fluorocytidine-3'-phosphate
  modified_base 15: mod_base = OTHER; note = 2'-O-methylguanosine-3'-phosphate
  modified_base 16: mod_base = OTHER; note = 2'-deoxy-2'-fluorouridine-3'-phosphate
  modified_base 17: mod_base = OTHER; note = 2'-O-methylguanosine-3'-phosphate
  modified_base 18: mod_base = OTHER; note = 2'-O-methyluridine-3'-phosphate
  modified_base 19: mod_base = OTHER; note = 2'-O-methyluridine-3'-phosphate
  modified_base 20: mod_base = OTHER; note = 2'-O-methyluridine-3'-phosphate
  modified_base 21: mod_base = OTHER; note = 2'-O-methylguanosine-3'-phosphorothioate
  modified_base 22: mod_base = OTHER; note = 2'-O-methyladenosine-3'-phosphorothioate
  modified_base 23: mod_base = OTHER; note = 2'-O-methyluridine
  misc_feature 1..4: note = RNA
  misc_feature 6..23: note = RNA
  misc_feature 5: note = DNA
tcgcctcccgggacgtgtttgat

SEQ ID NO: 463 - DNA, 23 bp, synthetic construct
  source 1..23: mol_type = other DNA
  modified_base 1: mod_base = OTHER; note = 2'-O-methyluridine-3'-phosphorothioate 5'-(E)-Vinylphosphonate
  modified_base 2: mod_base = OTHER; note = 2'-deoxy-2'-fluorocytidine-3'-phosphorothioate
  modified_base 3: mod_base = OTHER; note = 2'-O-methylcytidine-3'-phosphate
  modified_base 4: mod_base = OTHER; note = 2'-O-methylguanosine-3'-phosphate
  modified_base 6: mod_base = OTHER; note = 2'-O-methylcytidine-3'-phosphate
  modified_base 7: mod_base = OTHER; note = Thymidine-glycol nucleic acid (GNA), S-Isomer
  modified_base 8: mod_base = OTHER; note = 2'-O-methylcytidine-3'-phosphate
  modified_base 9: mod_base = OTHER; note = 2'-O-methylcytidine-3'-phosphate
  modified_base 10: mod_base = OTHER; note = 2'-O-methylcytidine-3'-phosphate
  modified_base 11: mod_base = OTHER; note = 2'-O-methylguanosine-3'-phosphate
  modified_base 12: mod_base = OTHER; note = 2'-O-methylguanosine-3'-phosphate
  modified_base 13: mod_base = OTHER; note = 2'-O-methylguanosine-3'-phosphate
  modified_base 14: mod_base = OTHER; note = 2'-deoxy-2'-fluoroadenosine-3'-phosphate
  modified_base 15: mod_base = OTHER; note = 2'-O-methylcytidine-3'-phosphate
  modified_base 16: mod_base = OTHER; note = 2'-deoxy-2'-fluoroguanosine-3'-phosphate
  modified_base 17: mod_base = OTHER; note = 2'-O-methyluridine-3'-phosphate
  modified_base 18: mod_base = OTHER; note = 2'-O-methylguanosine-3'-phosphate
  modified_base 19: mod_base = OTHER; note = 2'-O-methyluridine-3'-phosphate
  modified_base 20: mod_base = OTHER; note = 2'-O-methyluridine-3'-phosphate
  modified_base 21: mod_base = OTHER; note = 2'-O-methyluridine-3'-phosphorothioate
  modified_base 22: mod_base = OTHER; note = 2'-O-methylguanosine-3'-phosphorothioate
  modified_base 23: mod_base = OTHER; note = 2'-O-methyladenosine
  misc_feature 1..4: note = RNA
  misc_feature 6..23: note = RNA
  misc_feature 5: note = DNA
tccgcctcccgggacgtgtttga

SEQ ID NO: 464 - DNA, 23 bp, synthetic construct
  source 1..23: mol_type = other DNA
  modified_base 1: mod_base = OTHER; note = 2'-O-methyluridine-3'-phosphorothioate 5'-(E)-Vinylphosphonate
  modified_base 2: mod_base = OTHER; note = 2'-deoxy-2'-fluoroguanosine-3'-phosphorothioate
  modified_base 3: mod_base = OTHER; note = 2'-O-methylcytidine-3'-phosphate
  modified_base 4: mod_base = OTHER; note = 2'-O-methylcytidine-3'-phosphate
  modified_base 6: mod_base = OTHER; note = 2'-O-methylcytidine-3'-phosphate
  modified_base 7: mod_base = OTHER; note = cytidine-2'-phosphate
  modified_base 8: mod_base = OTHER; note = 2'-O-methyluridine-3'-phosphate
  modified_base 9: mod_base = OTHER; note = 2'-O-methylcytidine-3'-phosphate
  modified_base 10: mod_base = OTHER; note = 2'-O-methylcytidine-3'-phosphate
  modified_base 11: mod_base = OTHER; note = 2'-O-methylcytidine-3'-phosphate
  modified_base 12: mod_base = OTHER; note = 2'-O-methylguanosine-3'-phosphate
  modified_base 13: mod_base = OTHER; note = 2'-O-methylguanosine-3'-phosphate
  modified_base 14: mod_base = OTHER; note = 2'-deoxy-2'-fluoroguanosine-3'-phosphate
  modified_base 15: mod_base = OTHER; note = 2'-O-methyladenosine-3'-phosphate
  modified_base 16: mod_base = OTHER; note = 2'-deoxy-2'-fluorocytidine-3'-phosphate
  modified_base 17: mod_base = OTHER; note = 2'-O-methylguanosine-3'-phosphate
  modified_base 18: mod_base = OTHER; note = 2'-O-methyluridine-3'-phosphate
  modified_base 19: mod_base = OTHER; note = 2'-O-methylguanosine-3'-phosphate
  modified_base 20: mod_base = OTHER; note = 2'-O-methyluridine-3'-phosphate
  modified_base 21: mod_base = OTHER; note = 2'-O-methyluridine-3'-phosphorothioate
  modified_base 22: mod_base = OTHER; note = 2'-O-methyluridine-3'-phosphorothioate
  modified_base 23: mod_base = OTHER; note = 2'-O-methylguanosine
  misc_feature 1..4: note = RNA
  misc_feature 6..23: note = RNA
  misc_feature 5: note = DNA
tgccgcctcccgggacgtgtttg

SEQ ID NO: 465 - DNA, 23 bp, synthetic construct
  source 1..23: mol_type = other DNA
  modified_base 1: mod_base = OTHER; note = 2'-O-methyluridine-3'-phosphorothioate 5'-(E)-Vinylphosphonate
  modified_base 2: mod_base = OTHER; note = 2'-deoxy-2'-fluorouridine-3'-phosphorothioate
  modified_base 3: mod_base = OTHER; note = 2'-O-methylguanosine-3'-phosphate
  modified_base 4: mod_base = OTHER; note = 2'-O-methylcytidine-3'-phosphate
  modified_base 6: mod_base = OTHER; note = 2'-O-methylguanosine-3'-phosphate
  modified_base 7: mod_base = OTHER; note = cytidine-2'-phosphate
  modified_base 8: mod_base = OTHER; note = 2'-O-methylcytidine-3'-phosphate
  modified_base 9: mod_base = OTHER; note = 2'-O-methyluridine-3'-phosphate
  modified_base 10: mod_base = OTHER; note = 2'-O-methylcytidine-3'-phosphate
  modified_base 11: mod_base = OTHER; note = 2'-O-methylcytidine-3'-phosphate
  modified_base 12: mod_base = OTHER; note = 2'-O-methylcytidine-3'-phosphate
  modified_base 13: mod_base = OTHER; note = 2'-O-methylguanosine-3'-phosphate
  modified_base 14: mod_base = OTHER; note = 2'-deoxy-2'-fluoroguanosine-3'-phosphate
  modified_base 15: mod_base = OTHER; note = 2'-O-methylguanosine-3'-phosphate
  modified_base 16: mod_base = OTHER; note = 2'-deoxy-2'-fluoroadenosine-3'-phosphate
  modified_base 17: mod_base = OTHER; note = 2'-O-methylcytidine-3'-phosphate
  modified_base 18: mod_base = OTHER; note = 2'-O-methylguanosine-3'-phosphate
  modified_base 19: mod_base = OTHER; note = 2'-O-methyluridine-3'-phosphate
  modified_base 20: mod_base = OTHER; note = 2'-O-methylguanosine-3'-phosphate
  modified_base 21: mod_base = OTHER; note = 2'-O-methyluridine-3'-phosphorothioate
  modified_base 22: mod_base = OTHER; note = 2'-O-methyluridine-3'-phosphorothioate
  modified_base 23: mod_base = OTHER; note = 2'-O-methyluridine
  misc_feature 1..4: note = RNA
  misc_feature 6..23: note = RNA
  misc_feature 5: note = DNA
ttgccgcctcccgggacgtgttt

SEQ ID NO: 466 - DNA, 23 bp, synthetic construct
  source 1..23: mol_type = other DNA
  modified_base 1: mod_base = OTHER; note = 2'-O-methyluridine-3'-phosphorothioate 5'-(E)-Vinylphosphonate
  modified_base 2: mod_base = OTHER; note = 2'-deoxycytidine-3'-phosphorothioate
  modified_base 3: mod_base = OTHER; note = 2'-O-methyluridine-3'-phosphate
  modified_base 4: mod_base = OTHER; note = 2'-O-methylguanosine-3'-phosphate
  modified_base 6: mod_base = OTHER; note = 2'-O-methylcytidine-3'-phosphate
  modified_base 8: mod_base = OTHER; note = 2'-O-methylcytidine-3'-phosphate
  modified_base 9: mod_base = OTHER; note = 2'-O-methylcytidine-3'-phosphate
  modified_base 10: mod_base = OTHER; note = 2'-O-methyluridine-3'-phosphate
  modified_base 11: mod_base = OTHER; note = 2'-O-methylcytidine-3'-phosphate
  modified_base 13: mod_base = OTHER; note = 2'-O-methylcytidine-3'-phosphate
  modified_base 14: mod_base = OTHER; note = 2'-deoxy-2'-fluoroguanosine-3'-phosphate
  modified_base 15: mod_base = OTHER; note = 2'-O-methylguanosine-3'-phosphate
  modified_base 16: mod_base = OTHER; note = 2'-O-methylguanosine-3'-phosphate
  modified_base 17: mod_base = OTHER; note = 2'-O-methyladenosine-3'-phosphate
  modified_base 18: mod_base = OTHER; note = 2'-O-methylcytidine-3'-phosphate
  modified_base 19: mod_base = OTHER; note = 2'-O-methylguanosine-3'-phosphate
  modified_base 20: mod_base = OTHER; note = 2'-O-methyluridine-3'-phosphate
  modified_base 21: mod_base = OTHER; note = 2'-O-methylguanosine-3'-phosphorothioate
  modified_base 22: mod_base = OTHER; note = 2'-O-methyluridine-3'-phosphorothioate
  modified_base 23: mod_base = OTHER; note = 2'-O-methyluridine
  misc_feature 1: note = RNA
  misc_feature 3..4: note = RNA
  misc_feature 6: note = RNA
  misc_feature 8..11: note = RNA
  misc_feature 13..23: note = RNA
  misc_feature 2: note = DNA
  misc_feature 5: note = DNA
  misc_feature 7: note = DNA
  misc_feature 12: note = DNA
tctgccgcctcccgggacgtgtt

SEQ ID NO: 467 - DNA, 23 bp, synthetic construct
  source 1..23: mol_type = other DNA
  modified_base 1: mod_base = OTHER; note = 2'-O-methyluridine-3'-phosphorothioate 5'-(E)-Vinylphosphonate
  modified_base 2: mod_base = OTHER; note = 2'-deoxyguanosine-3'-phosphorothioate
  modified_base 3: mod_base = OTHER; note = 2'-O-methylcytidine-3'-phosphate
  modified_base 4: mod_base = OTHER; note = 2'-O-methyluridine-3'-phosphate
  modified_base 6: mod_base = OTHER; note = 2'-O-methylcytidine-3'-phosphate
  modified_base 7: mod_base = OTHER; note = Thymidine-glycol nucleic acid (GNA), S-Isomer
  modified_base 8: mod_base = OTHER; note = 2'-O-methyluridine-3'-phosphate
  modified_base 9: mod_base = OTHER; note = 2'-O-methyladenosine-3'-phosphate
  modified_base 10: mod_base = OTHER; note = 2'-O-methyluridine-3'-phosphate
  modified_base 11: mod_base = OTHER; note = 2'-O-methyluridine-3'-phosphate
  modified_base 13: mod_base = OTHER; note = 2'-O-methyladenosine-3'-phosphate
  modified_base 14: mod_base = OTHER; note = 2'-deoxy-2'-fluorouridine-3'-phosphate
  modified_base 15: mod_base = OTHER; note = 2'-O-methyluridine-3'-phosphate
  modified_base 16: mod_base = OTHER; note = 2'-O-methyladenosine-3'-phosphate
  modified_base 17: mod_base = OTHER; note = 2'-O-methyluridine-3'-phosphate
  modified_base 18: mod_base = OTHER; note = 2'-O-methylcytidine-3'-phosphate
  modified_base 19: mod_base = OTHER; note = 2'-O-methyluridine-3'-phosphate
  modified_base 20: mod_base = OTHER; note = 2'-O-methylguanosine-3'-phosphate
  modified_base 21: mod_base = OTHER; note = 2'-O-methylcytidine-3'-phosphorothioate
  modified_base 22: mod_base = OTHER; note = 2'-O-methyladenosine-3'-phosphorothioate
  modified_base 23: mod_base = OTHER; note = 2'-O-methylcytidine
  misc_feature 1: note = RNA
  misc_feature 3..4: note = RNA
  misc_feature 6..11: note = RNA
  misc_feature 13..23: note = RNA
  misc_feature 2: note = DNA
  misc_feature 5: note = DNA
  misc_feature 12: note = DNA
tgcttcttattaattatctgcac

SEQ ID NO: 468 - DNA, 23 bp, synthetic construct
  source 1..23: mol_type = other DNA
  modified_base 1: mod_base = OTHER; note = 2'-O-methyluridine-3'-phosphorothioate 5'-(E)-Vinylphosphonate
  modified_base 2: mod_base = OTHER; note = 2'-deoxyadenosine-3'-phosphorothioate
  modified_base 3: mod_base = OTHER; note = 2'-O-methylguanosine-3'-phosphate
  modified_base 4: mod_base = OTHER; note = 2'-O-methylcytidine-3'-phosphate
  modified_base 6: mod_base = OTHER; note = 2'-O-methyluridine-3'-phosphate
  modified_base 7: mod_base = OTHER; note = cytidine-2'-phosphate
  modified_base 8: mod_base = OTHER; note = 2'-O-methyluridine-3'-phosphate
  modified_base 9: mod_base = OTHER; note = 2'-O-methyluridine-3'-phosphate
  modified_base 10: mod_base = OTHER; note = 2'-O-methyladenosine-3'-phosphate
  modified_base 11: mod_base = OTHER; note = 2'-O-methyluridine-3'-phosphate
  modified_base 13: mod_base = OTHER; note = 2'-O-methyladenosine-3'-phosphate
  modified_base 14: mod_base = OTHER; note = 2'-deoxy-2'-fluoroadenosine-3'-phosphate
  modified_base 15: mod_base = OTHER; note = 2'-O-methyluridine-3'-phosphate
  modified_base 16: mod_base = OTHER; note = 2'-O-methyluridine-3'-phosphate
  modified_base 17: mod_base = OTHER; note = 2'-O-methyladenosine-3'-phosphate
  modified_base 18: mod_base = OTHER; note = 2'-O-methyluridine-3'-phosphate
  modified_base 19: mod_base = OTHER; note = 2'-O-methylcytidine-3'-phosphate
  modified_base 20: mod_base = OTHER; note = 2'-O-methyluridine-3'-phosphate
  modified_base 21: mod_base = OTHER; note = 2'-O-methylguanosine-3'-phosphorothioate
  modified_base 22: mod_base = OTHER; note = 2'-O-methylcytidine-3'-phosphorothioate
  modified_base 23: mod_base = OTHER; note = 2'-O-methyladenosine
  misc_feature 1: note = RNA
  misc_feature 3..4: note = RNA
  misc_feature 6..11: note = RNA
  misc_feature 13..23: note = RNA
  misc_feature 2: note = DNA
  misc_feature 5: note = DNA
  misc_feature 12: note = DNA
tagcttcttattaattatctgca

SEQ ID NO: 469 - DNA, 23 bp, synthetic construct
  source 1..23: mol_type = other DNA
  modified_base 1: mod_base = OTHER; note = 2'-O-methyluridine-3'-phosphorothioate 5'-(E)-Vinylphosphonate
  modified_base 2: mod_base = OTHER; note = 2'-deoxycytidine-3'-phosphorothioate
  modified_base 3: mod_base = OTHER; note = 2'-O-methylcytidine-3'-phosphate
  modified_base 4: mod_base = OTHER; note = 2'-O-methyladenosine-3'-phosphate
  modified_base 6: mod_base = OTHER; note = 2'-O-methylcytidine-3'-phosphate
  modified_base 7: mod_base = OTHER; note = Thymidine-glycol nucleic acid (GNA), S-Isomer
  modified_base 8: mod_base = OTHER; note = 2'-O-methyluridine-3'-phosphate
  modified_base 9: mod_base = OTHER; note = 2'-O-methylcytidine-3'-phosphate
  modified_base 10: mod_base = OTHER; note = 2'-O-methyluridine-3'-phosphate
  modified_base 11: mod_base = OTHER; note = 2'-O-methyluridine-3'-phosphate
  modified_base 13: mod_base = OTHER; note = 2'-O-methyluridine-3'-phosphate
  modified_base 14: mod_base = OTHER; note = 2'-deoxy-2'-fluorouridine-3'-phosphate
  modified_base 15: mod_base = OTHER; note = 2'-O-methyladenosine-3'-phosphate
  modified_base 16: mod_base = OTHER; note = 2'-O-methyladenosine-3'-phosphate
  modified_base 17: mod_base = OTHER; note = 2'-O-methyluridine-3'-phosphate
  modified_base 18: mod_base = OTHER; note = 2'-O-methyluridine-3'-phosphate
  modified_base 19: mod_base = OTHER; note = 2'-O-methyladenosine-3'-phosphate
  modified_base 20: mod_base = OTHER; note = 2'-O-methyluridine-3'-phosphate
  modified_base 21: mod_base = OTHER; note = 2'-O-methylcytidine-3'-phosphorothioate
  modified_base 22: mod_base = OTHER; note = 2'-O-methyluridine-3'-phosphorothioate
  modified_base 23: mod_base = OTHER; note = 2'-O-methylguanosine
  misc_feature 1: note = RNA
  misc_feature 3..4: note = RNA
  misc_feature 6..11: note = RNA
  misc_feature 13..23: note = RNA
  misc_feature 2: note = DNA
  misc_feature 5: note = DNA
  misc_feature 12: note = DNA
tccagcttcttattaattatctg

SEQ ID NO: 470 - DNA, 23 bp, synthetic construct
  source 1..23: mol_type = other DNA
  modified_base 1: mod_base = OTHER; note = 2'-O-methyluridine-3'-phosphorothioate 5'-(E)-Vinylphosphonate
  modified_base 2: mod_base = OTHER; note = 2'-deoxythymidine-3'-phosphorothioate
  modified_base 3: mod_base = OTHER; note = 2'-O-methylcytidine-3'-phosphate
  modified_base 4: mod_base = OTHER; note = 2'-O-methylcytidine-3'-phosphate
  modified_base 6: mod_base = OTHER; note = 2'-O-methylguanosine-3'-phosphate
  modified_base 7: mod_base = OTHER; note = cytidine-2'-phosphate
  modified_base 8: mod_base = OTHER; note = 2'-O-methyluridine-3'-phosphate
  modified_base 9: mod_base = OTHER; note = 2'-O-methyluridine-3'-phosphate
  modified_base 10: mod_base = OTHER; note = 2'-O-methylcytidine-3'-phosphate
  modified_base 11: mod_base = OTHER; note = 2'-O-methyluridine-3'-phosphate
  modified_base 13: mod_base = OTHER; note = 2'-O-methyladenosine-3'-phosphate
  modified_base 14: mod_base = OTHER; note = 2'-deoxy-2'-fluorouridine-3'-phosphate
  modified_base 15: mod_base = OTHER; note = 2'-O-methyluridine-3'-phosphate
  modified_base 16: mod_base = OTHER; note = 2'-O-methyladenosine-3'-phosphate
  modified_base 17: mod_base = OTHER; note = 2'-O-methyladenosine-3'-phosphate
  modified_base 18: mod_base = OTHER; note = 2'-O-methyluridine-3'-phosphate
  modified_base 19: mod_base = OTHER; note = 2'-O-methyluridine-3'-phosphate
  modified_base 20: mod_base = OTHER; note = 2'-O-methyladenosine-3'-phosphate
  modified_base 21: mod_base = OTHER; note = 2'-O-methyluridine-3'-phosphorothioate
  modified_base 22: mod_base = OTHER; note = 2'-O-methylcytidine-3'-phosphorothioate
  modified_base 23: mod_base = OTHER; note = 2'-O-methyluridine
  misc_feature 1: note = RNA
  misc_feature 3..4: note = RNA
  misc_feature 6..11: note = RNA
  misc_feature 13..23: note = RNA
  misc_feature 2: note = DNA
  misc_feature 5: note = DNA
  misc_feature 12: note = DNA
ttccagcttcttattaattatct

SEQ ID NO: 471 - DNA, 23 bp, synthetic construct
  source 1..23: mol_type = other DNA
  modified_base 1: mod_base = OTHER; note = 2'-O-methyluridine-3'-phosphorothioate 5'-(E)-Vinylphosphonate
  modified_base 2: mod_base = OTHER; note = 2'-deoxyadenosine-3'-phosphorothioate
  modified_base 3: mod_base = OTHER; note = 2'-O-methyluridine-3'-phosphate
  modified_base 4: mod_base = OTHER; note = 2'-O-methylcytidine-3'-phosphate
  modified_base 6: mod_base = OTHER; note = 2'-O-methyladenosine-3'-phosphate
  modified_base 7: mod_base = OTHER; note = guanosine-2'-phosphate
  modified_base 8: mod_base = OTHER; note = 2'-O-methylcytidine-3'-phosphate
  modified_base 9: mod_base = OTHER; note = 2'-O-methyluridine-3'-phosphate
  modified_base 10: mod_base = OTHER; note = 2'-O-methyluridine-3'-phosphate
  modified_base 11: mod_base = OTHER; note = 2'-O-methylcytidine-3'-phosphate
  modified_base 13: mod_base = OTHER; note = 2'-O-methyluridine-3'-phosphate
  modified_base 14: mod_base = OTHER; note = 2'-deoxy-2'-fluoroadenosine-3'-phosphate
  modified_base 15: mod_base = OTHER; note = 2'-O-methyluridine-3'-phosphate
  modified_base 16: mod_base = OTHER; note = 2'-O-methyluridine-3'-phosphate
  modified_base 17: mod_base = OTHER; note = 2'-O-methyladenosine-3'-phosphate
  modified_base 18: mod_base = OTHER; note = 2'-O-methyladenosine-3'-phosphate
  modified_base 19: mod_base = OTHER; note = 2'-O-methyluridine-3'-phosphate
  modified_base 20: mod_base = OTHER; note = 2'-O-methyluridine-3'-phosphate
  modified_base 21: mod_base = OTHER; note = 2'-O-methyladenosine-3'-phosphorothioate
  modified_base 22: mod_base = OTHER; note = 2'-O-methyluridine-3'-phosphorothioate
  modified_base 23: mod_base = OTHER; note = 2'-O-methylcytidine
  misc_feature 1: note = RNA
  misc_feature 3..4: note = RNA
  misc_feature 6..11: note = RNA
  misc_feature 13..23: note = RNA
  misc_feature 2: note = DNA
  misc_feature 5: note = DNA
  misc_feature 12: note = DNA
tatccagcttcttattaattatc

SEQ ID NO: 472 - DNA, 23 bp, synthetic construct
  source 1..23: mol_type = other DNA
  modified_base 1: mod_base = OTHER; note = 2'-O-methyluridine-3'-phosphorothioate 5'-(E)-Vinylphosphonate
  modified_base 2: mod_base = OTHER; note = 2'-deoxyguanosine-3'-phosphorothioate
  modified_base 3: mod_base = OTHER; note = 2'-O-methyladenosine-3'-phosphate
  modified_base 4: mod_base = OTHER; note = 2'-O-methyluridine-3'-phosphate
  modified_base 6: mod_base = OTHER; note = 2'-O-methylcytidine-3'-phosphate
  modified_base 7: mod_base = OTHER; note = Adenosine-glycol nucleic acid (GNA), S-isomer
  modified_base 8: mod_base = OTHER; note = 2'-O-methylguanosine-3'-phosphate
  modified_base 9: mod_base = OTHER; note = 2'-O-methylcytidine-3'-phosphate
  modified_base 10: mod_base = OTHER; note = 2'-O-methyluridine-3'-phosphate
  modified_base 11: mod_base = OTHER; note = 2'-O-methyluridine-3'-phosphate
  modified_base 13: mod_base = OTHER; note = 2'-O-methyluridine-3'-phosphate
  modified_base 14: mod_base = OTHER; note = 2'-deoxy-2'-fluorouridine-3'-phosphate
  modified_base 15: mod_base = OTHER; note = 2'-O-methyladenosine-3'-phosphate
  modified_base 16: mod_base = OTHER; note = 2'-O-methyluridine-3'-phosphate
  modified_base 17: mod_base = OTHER; note = 2'-O-methyluridine-3'-phosphate
  modified_base 18: mod_base = OTHER; note = 2'-O-methyladenosine-3'-phosphate
  modified_base 19: mod_base = OTHER; note = 2'-O-methyladenosine-3'-phosphate
  modified_base 20: mod_base = OTHER; note = 2'-O-methyluridine-3'-phosphate
  modified_base 21: mod_base = OTHER; note = 2'-O-methyluridine-3'-phosphorothioate
  modified_base 22: mod_base = OTHER; note = 2'-O-methyladenosine-3'-phosphorothioate
  modified_base 23: mod_base = OTHER; note = 2'-O-methyluridine
  misc_feature 1: note = RNA
  misc_feature 3..4: note = RNA
  misc_feature 6..11: note = RNA
  misc_feature 13..23: note = RNA
  misc_feature 2: note = DNA
  misc_feature 5: note = DNA
  misc_feature 12: note = DNA
tgatccagcttcttattaattat

SEQ ID NO: 473 - DNA, 23 bp, synthetic construct
  source 1..23: mol_type = other DNA
  modified_base 1: mod_base = OTHER; note = 2'-O-methyluridine-3'-phosphorothioate 5'-(E)-Vinylphosphonate
  modified_base 2: mod_base = OTHER; note = 2'-deoxyadenosine-3'-phosphorothioate
  modified_base 3: mod_base = OTHER; note = 2'-O-methylguanosine-3'-phosphate
  modified_base 4: mod_base = OTHER; note = 2'-O-methyladenosine-3'-phosphate
  modified_base 6: mod_base = OTHER; note = 2'-O-methylcytidine-3'-phosphate
  modified_base 7: mod_base = OTHER; note = cytidine-2'-phosphate
  modified_base 8: mod_base = OTHER; note = 2'-O-methyladenosine-3'-phosphate
  modified_base 9: mod_base = OTHER; note = 2'-O-methylguanosine-3'-phosphate
  modified_base 10: mod_base = OTHER; note = 2'-O-methylcytidine-3'-phosphate
  modified_base 11: mod_base = OTHER; note = 2'-O-methyluridine-3'-phosphate
  modified_base 13: mod_base = OTHER; note = 2'-O-methylcytidine-3'-phosphate
  modified_base 14: mod_base = OTHER; note = 2'-deoxy-2'-fluorouridine-3'-phosphate
  modified_base 15: mod_base = OTHER; note = 2'-O-methyluridine-3'-phosphate
  modified_base 16: mod_base = OTHER; note = 2'-O-methyladenosine-3'-phosphate
  modified_base 17: mod_base = OTHER; note = 2'-O-methyluridine-3'-phosphate
  modified_base 18: mod_base = OTHER; note = 2'-O-methyluridine-3'-phosphate
  modified_base 19: mod_base = OTHER; note = 2'-O-methyladenosine-3'-phosphate
  modified_base 20: mod_base = OTHER; note = 2'-O-methyladenosine-3'-phosphate
  modified_base 21: mod_base = OTHER; note = 2'-O-methyluridine-3'-phosphorothioate
  modified_base 22: mod_base = OTHER; note = 2'-O-methyluridine-3'-phosphorothioate
  modified_base 23: mod_base = OTHER; note = 2'-O-methyladenosine
  misc_feature 1: note = RNA
  misc_feature 3..4: note = RNA
  misc_feature 6..11: note = RNA
  misc_feature 13..23: note = RNA
  misc_feature 2: note = DNA
  misc_feature 5: note = DNA
  misc_feature 12: note = DNA
tagatccagcttcttattaatta

SEQ ID NO: 474 - DNA, 23 bp, synthetic construct
  source 1..23: mol_type = other DNA
  modified_base 1: mod_base = OTHER; note = 2'-O-methyluridine-3'-phosphorothioate 5'-(E)-Vinylphosphonate
  modified_base 2: mod_base = OTHER; note = 2'-deoxythymidine-3'-phosphorothioate
  modified_base 3: mod_base = OTHER; note = 2'-O-methyladenosine-3'-phosphate
  modified_base 4: mod_base = OTHER; note = 2'-O-methyladenosine-3'-phosphate
  modified_base 6: mod_base = OTHER; note = 2'-O-methyladenosine-3'-phosphate
  modified_base 7: mod_base = OTHER; note = Thymidine-glycol nucleic acid (GNA), S-Isomer
  modified_base 8: mod_base = OTHER; note = 2'-O-methylcytidine-3'-phosphate
  modified_base 9: mod_base = OTHER; note = 2'-O-methylcytidine-3'-phosphate
  modified_base 10: mod_base = OTHER; note = 2'-O-methyladenosine-3'-phosphate
  modified_base 11: mod_base = OTHER; note = 2'-O-methylguanosine-3'-phosphate
  modified_base 13: mod_base = OTHER; note = 2'-O-methyluridine-3'-phosphate
  modified_base 14: mod_base = OTHER; note = 2'-deoxy-2'-fluorouridine-3'-phosphate
  modified_base 15: mod_base = OTHER; note = 2'-O-methylcytidine-3'-phosphate
  modified_base 16: mod_base = OTHER; note = 2'-O-methyluridine-3'-phosphate
  modified_base 17: mod_base = OTHER; note = 2'-O-methyluridine-3'-phosphate
  modified_base 18: mod_base = OTHER; note = 2'-O-methyladenosine-3'-phosphate
  modified_base 19: mod_base = OTHER; note = 2'-O-methyluridine-3'-phosphate
  modified_base 20: mod_base = OTHER; note = 2'-O-methyluridine-3'-phosphate
  modified_base 21: mod_base = OTHER; note = 2'-O-methyladenosine-3'-phosphorothioate
  modified_base 22: mod_base = OTHER; note = 2'-O-methyladenosine-3'-phosphorothioate
  modified_base 23: mod_base = OTHER; note = 2'-O-methyluridine
  misc_feature 1: note = RNA
  misc_feature 3..4: note = RNA
  misc_feature 6..11: note = RNA
  misc_feature 13..23: note = RNA
  misc_feature 2: note = DNA
  misc_feature 5: note = DNA
  misc_feature 12: note = DNA
ttaagatccagcttcttattaat

SEQ ID NO: 475 - DNA, 23 bp, synthetic construct
  source 1..23: mol_type = other DNA
  modified_base 1: mod_base = OTHER; note = 2'-O-methyluridine-3'-phosphorothioate 5'-(E)-Vinylphosphonate
  modified_base 2: mod_base = OTHER; note = 2'-deoxycytidine-3'-phosphorothioate
  modified_base 3: mod_base = OTHER; note = 2'-O-methyluridine-3'-phosphate
  modified_base 4: mod_base = OTHER; note = 2'-O-methyladenosine-3'-phosphate
  modified_base 6: mod_base = OTHER; note = 2'-O-methylguanosine-3'-phosphate
  modified_base 7: mod_base = OTHER; note = Adenosine-glycol nucleic acid (GNA), S-isomer
  modified_base 8: mod_base = OTHER; note = 2'-O-methyluridine-3'-phosphate
  modified_base 9: mod_base = OTHER; note = 2'-O-methylcytidine-3'-phosphate
  modified_base 10: mod_base = OTHER; note = 2'-O-methylcytidine-3'-phosphate
  modified_base 11: mod_base = OTHER; note = 2'-O-methyladenosine-3'-phosphate
  modified_base 13: mod_base = OTHER; note = 2'-O-methylcytidine-3'-phosphate
  modified_base 14: mod_base = OTHER; note = 2'-deoxy-2'-fluorouridine-3'-phosphate
  modified_base 15: mod_base = OTHER; note = 2'-O-methyluridine-3'-phosphate
  modified_base 16: mod_base = OTHER; note = 2'-O-methylcytidine-3'-phosphate
  modified_base 17: mod_base = OTHER; note = 2'-O-methyluridine-3'-phosphate
  modified_base 18: mod_base = OTHER; note = 2'-O-methyluridine-3'-phosphate
  modified_base 19: mod_base = OTHER; note = 2'-O-methyladenosine-3'-phosphate
  modified_base 20: mod_base = OTHER; note = 2'-O-methyluridine-3'-phosphate
  modified_base 21: mod_base = OTHER; note = 2'-O-methyluridine-3'-phosphorothioate
  modified_base 22: mod_base = OTHER; note = 2'-O-methyladenosine-3'-phosphorothioate
  modified_base 23: mod_base = OTHER; note = 2'-O-methyladenosine
  misc_feature 1: note = RNA
  misc_feature 3..4: note = RNA
  misc_feature 6..11: note = RNA
  misc_feature 13..23: note = RNA
  misc_feature 2: note = DNA
  misc_feature 5: note = DNA
  misc_feature 12: note = DNA
tctaagatccagcttcttattaa

SEQ ID NO: 476 - DNA, 23 bp, synthetic construct
  source 1..23: mol_type = other DNA
  modified_base 1: mod_base = OTHER; note = 2'-O-methyluridine-3'-phosphorothioate 5'-(E)-Vinylphosphonate
  modified_base 2: mod_base = OTHER; note = 2'-deoxythymidine-3'-phosphorothioate
  modified_base 3: mod_base = OTHER; note = 2'-O-methylguanosine-3'-phosphate
  modified_base 4: mod_base = OTHER; note = 2'-O-methylcytidine-3'-phosphate
  modified_base 6: mod_base = OTHER; note = 2'-O-methyladenosine-3'-phosphate
  modified_base 7: mod_base = OTHER; note = Adenosine-glycol nucleic acid (GNA), S-isomer
  modified_base 8: mod_base = OTHER; note = 2'-O-methylguanosine-3'-phosphate
  modified_base 9: mod_base = OTHER; note = 2'-O-methyladenosine-3'-phosphate
  modified_base 10: mod_base = OTHER; note = 2'-O-methyluridine-3'-phosphate
  modified_base 11: mod_base = OTHER; note = 2'-O-methylcytidine-3'-phosphate
  modified_base 13: mod_base = OTHER; note = 2'-O-methyladenosine-3'-phosphate
  modified_base 14: mod_base = OTHER; note = 2'-deoxy-2'-fluoroguanosine-3'-phosphate
  modified_base 15: mod_base = OTHER; note = 2'-O-methylcytidine-3'-phosphate
  modified_base 16: mod_base = OTHER; note = 2'-O-methyluridine-3'-phosphate
  modified_base 17: mod_base = OTHER; note = 2'-O-methyluridine-3'-phosphate
  modified_base 18: mod_base = OTHER; note = 2'-O-methylcytidine-3'-phosphate
  modified_base 19: mod_base = OTHER; note = 2'-O-methyluridine-3'-phosphate
  modified_base 20: mod_base = OTHER; note = 2'-O-methyluridine-3'-phosphate
  modified_base 21: mod_base = OTHER; note = 2'-O-methyladenosine-3'-phosphorothioate
  modified_base 22: mod_base = OTHER; note = 2'-O-methyluridine-3'-phosphorothioate
  modified_base 23: mod_base = OTHER; note = 2'-O-methyluridine
  misc_feature 1: note = RNA
  misc_feature 3..4: note = RNA
  misc_feature 6..11: note = RNA
  misc_feature 13..23: note = RNA
  misc_feature 2: note = DNA
  misc_feature 5: note = DNA
  misc_feature 12: note = DNA
ttgctaagatccagcttcttatt

SEQ ID NO: 477 - DNA, 23 bp, synthetic construct
  source 1..23: mol_type = other DNA
  modified_base 1: mod_base = OTHER; note = 2'-O-methyluridine-3'-phosphorothioate 5'-(E)-Vinylphosphonate
  modified_base 2: mod_base = OTHER; note = 2'-deoxythymidine-3'-phosphorothioate
  modified_base 3: mod_base = OTHER; note = 2'-O-methyluridine-3'-phosphate
  modified_base 4: mod_base = OTHER; note = 2'-O-methylguanosine-3'-phosphate
  modified_base 6: mod_base = OTHER; note = 2'-O-methyluridine-3'-phosphate
  modified_base 7: mod_base = OTHER; note = Adenosine-glycol nucleic acid (GNA), S-isomer
  modified_base 8: mod_base = OTHER; note = 2'-O-methyladenosine-3'-phosphate
  modified_base 9: mod_base = OTHER; note = 2'-O-methylguanosine-3'-phosphate
  modified_base 10: mod_base = OTHER; note = 2'-O-methyladenosine-3'-phosphate
  modified_base 11: mod_base = OTHER; note = 2'-O-methyluridine-3'-phosphate
  modified_base 13: mod_base = OTHER; note = 2'-O-methylcytidine-3'-phosphate
  modified_base 14: mod_base = OTHER; note = 2'-deoxy-2'-fluoroadenosine-3'-phosphate
  modified_base 15: mod_base = OTHER; note = 2'-O-methylguanosine-3'-phosphate
  modified_base 16: mod_base = OTHER; note = 2'-O-methylcytidine-3'-phosphate
  modified_base 17: mod_base = OTHER; note = 2'-O-methyluridine-3'-phosphate
  modified_base 18: mod_base = OTHER; note = 2'-O-methyluridine-3'-phosphate
  modified_base 19: mod_base = OTHER; note = 2'-O-methylcytidine-3'-phosphate
  modified_base 20: mod_base = OTHER; note = 2'-O-methyluridine-3'-phosphate
  modified_base 21: mod_base = OTHER; note = 2'-O-methyluridine-3'-phosphorothioate
  modified_base 22: mod_base = OTHER; note = 2'-O-methyladenosine-3'-phosphorothioate
  modified_base 23: mod_base = OTHER; note = 2'-O-methyluridine
  misc_feature 1: note = RNA
  misc_feature 3..4: note = RNA
  misc_feature 6..11: note = RNA
  misc_feature 13..23: note = RNA
  misc_feature 2: note = DNA
  misc_feature 5: note = DNA
  misc_feature 12: note = DNA
tttgctaagatccagcttcttat

SEQ ID NO: 478 - DNA, 23 bp, synthetic construct
  source 1..23: mol_type = other DNA
  modified_base 1: mod_base = OTHER; note = 2'-O-methyluridine-3'-phosphorothioate 5'-(E)-Vinylphosphonate
  modified_base 2: mod_base = OTHER; note = 2'-deoxyguanosine-3'-phosphorothioate
  modified_base 3: mod_base = OTHER; note = 2'-O-methyluridine-3'-phosphate
  modified_base 4: mod_base = OTHER; note = 2'-O-methyluridine-3'-phosphate
  modified_base 6: mod_base = OTHER; note = 2'-O-methylcytidine-3'-phosphate
  modified_base 7: mod_base = OTHER; note = Thymidine-glycol nucleic acid (GNA), S-Isomer
  modified_base 8: mod_base = OTHER; note = 2'-O-methyladenosine-3'-phosphate
  modified_base 9: mod_base = OTHER; note = 2'-O-methyladenosine-3'-phosphate
  modified_base 10: mod_base = OTHER; note = 2'-O-methylguanosine-3'-phosphate
  modified_base 11: mod_base = OTHER; note = 2'-O-methyladenosine-3'-phosphate
  modified_base 13: mod_base = OTHER; note = 2'-O-methylcytidine-3'-phosphate
  modified_base 14: mod_base = OTHER; note = 2'-deoxy-2'-fluorocytidine-3'-phosphate
  modified_base 15: mod_base = OTHER; note = 2'-O-methyladenosine-3'-phosphate
  modified_base 16: mod_base = OTHER; note = 2'-O-methylguanosine-3'-phosphate
  modified_base 17: mod_base = OTHER; note = 2'-O-methylcytidine-3'-phosphate
  modified_base 18: mod_base = OTHER; note = 2'-O-methyluridine-3'-phosphate
  modified_base 19: mod_base = OTHER; note = 2'-O-methyluridine-3'-phosphate
  modified_base 20: mod_base = OTHER; note = 2'-O-methylcytidine-3'-phosphate
  modified_base 21: mod_base = OTHER; note = 2'-O-methyluridine-3'-phosphorothioate
  modified_base 22: mod_base = OTHER; note = 2'-O-methyluridine-3'-phosphorothioate
  modified_base 23: mod_base = OTHER; note = 2'-O-methyladenosine
  misc_feature 1: note = RNA
  misc_feature 3..4: note = RNA
  misc_feature 6..11: note = RNA
  misc_feature 13..23: note = RNA
  misc_feature 2: note = DNA
  misc_feature 5: note = DNA
  misc_feature 12: note = DNA
tgttgctaagatccagcttctta

SEQ ID NO: 479 - DNA, 23 bp, synthetic construct
  source 1..23: mol_type = other DNA
  modified_base 1: mod_base = OTHER; note = 2'-O-methyluridine-3'-phosphorothioate 5'-(E)-Vinylphosphonate
  modified_base 2: mod_base = OTHER; note = 2'-deoxycytidine-3'-phosphorothioate
  modified_base 3: mod_base = OTHER; note = 2'-O-methylguanosine-3'-phosphate
  modified_base 4: mod_base = OTHER; note = 2'-O-methyluridine-3'-phosphate
  modified_base 6: mod_base = OTHER; note = 2'-O-methylguanosine-3'-phosphate
  modified_base 7: mod_base = OTHER; note = cytidine-2'-phosphate
  modified_base 8: mod_base = OTHER; note = 2'-O-methyluridine-3'-phosphate
  modified_base 9: mod_base = OTHER; note = 2'-O-methyladenosine-3'-phosphate
  modified_base 10: mod_base = OTHER; note = 2'-O-methyladenosine-3'-phosphate
  modified_base 11: mod_base = OTHER; note = 2'-O-methylguanosine-3'-phosphate
  modified_base 13: mod_base = OTHER; note = 2'-O-methyluridine-3'-phosphate
  modified_base 14: mod_base = OTHER; note = 2'-deoxy-2'-fluorocytidine-3'-phosphate
  modified_base 15: mod_base = OTHER; note = 2'-O-methylcytidine-3'-phosphate
  modified_base 16: mod_base = OTHER; note = 2'-O-methyladenosine-3'-phosphate
  modified_base 17: mod_base = OTHER; note = 2'-O-methylguanosine-3'-phosphate
  modified_base 18: mod_base = OTHER; note = 2'-O-methylcytidine-3'-phosphate
  modified_base 19: mod_base = OTHER; note = 2'-O-methyluridine-3'-phosphate
  modified_base 20: mod_base = OTHER; note = 2'-O-methyluridine-3'-phosphate
  modified_base 21: mod_base = OTHER; note = 2'-O-methylcytidine-3'-phosphorothioate
  modified_base 22: mod_base = OTHER; note = 2'-O-methyluridine-3'-phosphorothioate
  modified_base 23: mod_base = OTHER; note = 2'-O-methyluridine
  misc_feature 1: note = RNA
  misc_feature 3..4: note = RNA
  misc_feature 6..11: note = RNA
  misc_feature 13..23: note = RNA
  misc_feature 2: note = DNA
  misc_feature 5: note = DNA
  misc_feature 12: note = DNA
tcgttgctaagatccagcttctt

SEQ ID NO: 480 - DNA, 23 bp, synthetic construct
  source 1..23: mol_type = other DNA
  modified_base 1: mod_base = OTHER; note = 2'-O-methyluridine-3'-phosphorothioate 5'-(E)-Vinylphosphonate
  modified_base 2: mod_base = OTHER; note = 2'-deoxyadenosine-3'-phosphorothioate
  modified_base 3: mod_base = OTHER; note = 2'-O-methylcytidine-3'-phosphate
  modified_base 4: mod_base = OTHER; note = 2'-O-methylguanosine-3'-phosphate
  modified_base 6: mod_base = OTHER; note = 2'-O-methyluridine-3'-phosphate
  modified_base 7: mod_base = OTHER; note = guanosine-2'-phosphate
  modified_base 8: mod_base = OTHER; note = 2'-O-methylcytidine-3'-phosphate
  modified_base 9: mod_base = OTHER; note = 2'-O-methyluridine-3'-phosphate
  modified_base 10: mod_base = OTHER; note = 2'-O-methyladenosine-3'-phosphate
  modified_base 11: mod_base = OTHER; note = 2'-O-methyladenosine-3'-phosphate
  modified_base 13: mod_base = OTHER; note = 2'-O-methyladenosine-3'-phosphate
  modified_base 14: mod_base = OTHER; note = 2'-deoxy-2'-fluorouridine-3'-phosphate
  modified_base 15: mod_base = OTHER; note = 2'-O-methylcytidine-3'-phosphate
  modified_base 16: mod_base = OTHER; note = 2'-O-methylcytidine-3'-phosphate
  modified_base 17: mod_base = OTHER; note = 2'-O-methyladenosine-3'-phosphate
  modified_base 18: mod_base = OTHER; note = 2'-O-methylguanosine-3'-phosphate
  modified_base 19: mod_base = OTHER; note = 2'-O-methylcytidine-3'-phosphate
  modified_base 20: mod_base = OTHER; note = 2'-O-methyluridine-3'-phosphate
  modified_base 21: mod_base = OTHER; note = 2'-O-methyluridine-3'-phosphorothioate
  modified_base 22: mod_base = OTHER; note = 2'-O-methylcytidine-3'-phosphorothioate
  modified_base 23: mod_base = OTHER; note = 2'-O-methyluridine
  misc_feature 1: note = RNA
  misc_feature 3..4: note = RNA
  misc_feature 6..11: note = RNA
  misc_feature 13..23: note = RNA
  misc_feature 2: note = DNA
  misc_feature 5: note = DNA
  misc_feature 12: note = DNA
tacgttgctaagatccagcttct

SEQ ID NO: 481 - DNA, 23 bp, synthetic construct
  source 1..23: mol_type = other DNA
  modified_base 1: mod_base = OTHER; note = 2'-O-methyluridine-3'-phosphorothioate 5'-(E)-Vinylphosphonate
  modified_base 2: mod_base = OTHER; note = 2'-deoxythymidine-3'-phosphorothioate
  modified_base 3: mod_base = OTHER; note = 2'-O-methylguanosine-3'-phosphate
  modified_base 4: mod_base = OTHER; note = 2'-O-methylguanosine-3'-phosphate
  modified_base 6: mod_base = OTHER; note = 2'-O-methylcytidine-3'-phosphate
  modified_base 7: mod_base = OTHER; note = guanosine-2'-phosphate
  modified_base 8: mod_base = OTHER; note = 2'-O-methyluridine-3'-phosphate
  modified_base 9: mod_base = OTHER; note = 2'-O-methyluridine-3'-phosphate
  modified_base 10: mod_base = OTHER; note = 2'-O-methylguanosine-3'-phosphate
  modified_base 11: mod_base = OTHER; note = 2'-O-methylcytidine-3'-phosphate
  modified_base 13: mod_base = OTHER; note = 2'-O-methyladenosine-3'-phosphate
  modified_base 14: mod_base = OTHER; note = 2'-deoxy-2'-fluoroadenosine-3'-phosphate
  modified_base 15: mod_base = OTHER; note = 2'-O-methylguanosine-3'-phosphate
  modified_base 16: mod_base = OTHER; note = 2'-O-methyladenosine-3'-phosphate
  modified_base 17: mod_base = OTHER; note = 2'-O-methyluridine-3'-phosphate
  modified_base 18: mod_base = OTHER; note = 2'-O-methylcytidine-3'-phosphate
  modified_base 19: mod_base = OTHER; note = 2'-O-methylcytidine-3'-phosphate
  modified_base 20: mod_base = OTHER; note = 2'-O-methyladenosine-3'-phosphate
  modified_base 21: mod_base = OTHER; note = 2'-O-methylguanosine-3'-phosphorothioate
  modified_base 22: mod_base = OTHER; note = 2'-O-methylcytidine-3'-phosphorothioate
  modified_base 23: mod_base = OTHER; note = 2'-O-methyluridine
  misc_feature 1: note = RNA
  misc_feature 3..4: note = RNA
  misc_feature 6..11: note = RNA
  misc_feature 13..23: note = RNA
  misc_feature 2: note = DNA
  misc_feature 5: note = DNA
  misc_feature 12: note = DNA
ttggacgttgctaagatccagct

SEQ ID NO: 482 - DNA, 23 bp, synthetic construct
  source 1..23: mol_type = other DNA
  modified_base 1: mod_base = OTHER; note = 2'-O-methyluridine-3'-phosphorothioate 5'-(E)-Vinylphosphonate
  modified_base 2: mod_base = OTHER; note = 2'-deoxyadenosine-3'-phosphorothioate
  modified_base 3: mod_base = OTHER; note = 2'-O-methylcytidine-3'-phosphate
  modified_base 4: mod_base = OTHER; note = 2'-O-methyluridine-3'-phosphate
  modified_base 6: mod_base = OTHER; note = 2'-O-methylguanosine-3'-phosphate
  modified_base 7: mod_base = OTHER; note = Adenosine-glycol nucleic acid (GNA), S-isomer
  modified_base 8: mod_base = OTHER; note = 2'-O-methylcytidine-3'-phosphate
  modified_base 9: mod_base = OTHER; note = 2'-O-methylguanosine-3'-phosphate
  modified_base 10: mod_base = OTHER; note = 2'-O-methyluridine-3'-phosphate
  modified_base 11: mod_base = OTHER; note = 2'-O-methyluridine-3'-phosphate
  modified_base 13: mod_base = OTHER; note = 2'-O-methylcytidine-3'-phosphate
  modified_base 14: mod_base = OTHER; note = 2'-deoxy-2'-fluorouridine-3'-phosphate
  modified_base 15: mod_base = OTHER; note = 2'-O-methyladenosine-3'-phosphate
  modified_base 16: mod_base = OTHER; note = 2'-O-methyladenosine-3'-phosphate
  modified_base 17: mod_base = OTHER; note = 2'-O-methylguanosine-3'-phosphate
  modified_base 18: mod_base = OTHER; note = 2'-O-methyladenosine-3'-phosphate
  modified_base 19: mod_base = OTHER; note = 2'-O-methyluridine-3'-phosphate
  modified_base 20: mod_base = OTHER; note = 2'-O-methylcytidine-3'-phosphate
  modified_base 21: mod_base = OTHER; note = 2'-O-methylcytidine-3'-phosphorothioate
  modified_base 22: mod_base = OTHER; note = 2'-O-methyladenosine-3'-phosphorothioate
  modified_base 23: mod_base = OTHER; note = 2'-O-methylguanosine
  misc_feature 1: note = RNA
  misc_feature 3..4: note = RNA
  misc_feature 6..11: note = RNA
  misc_feature 13..23: note = RNA
  misc_feature 2: note = DNA
  misc_feature 5: note = DNA
  misc_feature 12: note = DNA
tactggacgttgctaagatccag

SEQ ID NO: 483 - DNA, 23 bp, synthetic construct
  source 1..23: mol_type = other DNA
  modified_base 1: mod_base = OTHER; note = 2'-O-methyluridine-3'-phosphorothioate 5'-(E)-Vinylphosphonate
  modified_base 2: mod_base = OTHER; note = 2'-deoxyguanosine-3'-phosphorothioate
  modified_base 3: mod_base = OTHER; note = 2'-O-methyladenosine-3'-phosphate
  modified_base 4: mod_base = OTHER; note = 2'-O-methylcytidine-3'-phosphate
  modified_base 6: mod_base = OTHER; note = 2'-O-methylguanosine-3'-phosphate
  modified_base 7: mod_base = OTHER; note = guanosine-2'-phosphate
  modified_base 8: mod_base = OTHER; note = 2'-O-methyladenosine-3'-phosphate
  modified_base 9: mod_base = OTHER; note = 2'-O-methylcytidine-3'-phosphate
  modified_base 10: mod_base = OTHER; note = 2'-O-methylguanosine-3'-phosphate
  modified_base 11: mod_base = OTHER; note = 2'-O-methyluridine-3'-phosphate
  modified_base 13: mod_base = OTHER; note = 2'-O-methylguanosine-3'-phosphate
  modified_base 14: mod_base = OTHER; note = 2'-deoxy-2'-fluorocytidine-3'-phosphate
  modified_base 15: mod_base = OTHER; note = 2'-O-methyluridine-3'-phosphate
  modified_base 16: mod_base = OTHER; note = 2'-O-methyladenosine-3'-phosphate
  modified_base 17: mod_base = OTHER; note = 2'-O-methyladenosine-3'-phosphate
  modified_base 18: mod_base = OTHER; note = 2'-O-methylguanosine-3'-phosphate
  modified_base 19: mod_base = OTHER; note = 2'-O-methyladenosine-3'-phosphate
  modified_base 20: mod_base = OTHER; note = 2'-O-methyluridine-3'-phosphate
  modified_base 21: mod_base = OTHER; note = 2'-O-methylcytidine-3'-phosphorothioate
  modified_base 22: mod_base = OTHER; note = 2'-O-methylcytidine-3'-phosphorothioate
  modified_base 23: mod_base = OTHER; note = 2'-O-methyladenosine
  misc_feature 1: note = RNA
  misc_feature 3..4: note = RNA
  misc_feature 6..11: note = RNA
  misc_feature 13..23: note = RNA
  misc_feature 2: note = DNA
  misc_feature 5: note = DNA
  misc_feature 12: note = DNA
tgactggacgttgctaagatcca

SEQ ID NO: 484 - DNA, 23 bp, synthetic construct
  source 1..23: mol_type = other DNA
  modified_base 1: mod_base = OTHER; note = 2'-O-methyluridine-3'-phosphorothioate 5'-(E)-Vinylphosphonate
  modified_base 2: mod_base = OTHER; note = 2'-deoxyguanosine-3'-phosphorothioate
  modified_base 3: mod_base = OTHER; note = 2'-O-methylguanosine-3'-phosphate
  modified_base 4: mod_base = OTHER; note = 2'-O-methyladenosine-3'-phosphate
  modified_base 6: mod_base = OTHER; note = 2'-O-methyluridine-3'-phosphate
  modified_base 7: mod_base = OTHER; note = guanosine-2'-phosphate
  modified_base 8: mod_base = OTHER; note = 2'-O-methylguanosine-3'-phosphate
  modified_base 9: mod_base = OTHER; note = 2'-O-methyladenosine-3'-phosphate
  modified_base 10: mod_base = OTHER; note = 2'-O-methylcytidine-3'-phosphate
  modified_base 11: mod_base = OTHER; note = 2'-O-methylguanosine-3'-phosphate
  modified_base 13: mod_base = OTHER; note = 2'-O-methyluridine-3'-phosphate
  modified_base 14: mod_base = OTHER; note = 2'-deoxy-2'-fluoroguanosine-3'-phosphate
  modified_base 15: mod_base = OTHER; note = 2'-O-methylcytidine-3'-phosphate
  modified_base 16: mod_base = OTHER; note = 2'-O-methyluridine-3'-phosphate
  modified_base 17: mod_base = OTHER; note = 2'-O-methyladenosine-3'-phosphate
  modified_base 18: mod_base = OTHER; note = 2'-O-methyladenosine-3'-phosphate
  modified_base 19: mod_base = OTHER; note = 2'-O-methylguanosine-3'-phosphate
  modified_base 20: mod_base = OTHER; note = 2'-O-methyladenosine-3'-phosphate
  modified_base 21: mod_base = OTHER; note = 2'-O-methyluridine-3'-phosphorothioate
  modified_base 22: mod_base = OTHER; note = 2'-O-methylcytidine-3'-phosphorothioate
  modified_base 23: mod_base = OTHER; note = 2'-O-methylcytidine
  misc_feature 1: note = RNA
  misc_feature 3..4: note = RNA
  misc_feature 6..11: note = RNA
  misc_feature 13..23: note = RNA
  misc_feature 2: note = DNA
  misc_feature 5: note = DNA
  misc_feature 12: note = DNA
tggactggacgttgctaagatcc

SEQ ID NO: 485 - DNA, 23 bp, synthetic construct
  source 1..23: mol_type = other DNA
  modified_base 1: mod_base = OTHER; note = 2'-O-methyluridine-3'-phosphorothioate 5'-(E)-Vinylphosphonate
  modified_base 2: mod_base = OTHER; note = 2'-deoxythymidine-3'-phosphorothioate
  modified_base 3: mod_base = OTHER; note = 2'-O-methylguanosine-3'-phosphate
  modified_base 4: mod_base = OTHER; note = 2'-O-methylguanosine-3'-phosphate
  modified_base 6: mod_base = OTHER; note = 2'-O-methylcytidine-3'-phosphate
  modified_base 7: mod_base = OTHER; note = Thymidine-glycol nucleic acid (GNA), S-Isomer
  modified_base 8: mod_base = OTHER; note = 2'-O-methylguanosine-3'-phosphate
  modified_base 9: mod_base = OTHER; note = 2'-O-methylguanosine-3'-phosphate
  modified_base 10: mod_base = OTHER; note = 2'-O-methyladenosine-3'-phosphate
  modified_base 11: mod_base = OTHER; note = 2'-O-methylcytidine-3'-phosphate
  modified_base 13: mod_base = OTHER; note = 2'-O-methyluridine-3'-phosphate
  modified_base 14: mod_base = OTHER; note = 2'-deoxy-2'-fluorouridine-3'-phosphate
  modified_base 15: mod_base = OTHER; note = 2'-O-methylguanosine-3'-phosphate
  modified_base 16: mod_base = OTHER; note = 2'-O-methylcytidine-3'-phosphate
  modified_base 17: mod_base = OTHER; note = 2'-O-methyluridine-3'-phosphate
  modified_base 18: mod_base = OTHER; note = 2'-O-methyladenosine-3'-phosphate
  modified_base 19: mod_base = OTHER; note = 2'-O-methyladenosine-3'-phosphate
  modified_base 20: mod_base = OTHER; note = 2'-O-methylguanosine-3'-phosphate
  modified_base 21: mod_base = OTHER; note = 2'-O-methyladenosine-3'-phosphorothioate
  modified_base 22: mod_base = OTHER; note = 2'-O-methyluridine-3'-phosphorothioate
  modified_base 23: mod_base = OTHER; note = 2'-O-methylcytidine
  misc_feature 1: note = RNA
  misc_feature 3..4: note = RNA
  misc_feature 6..11: note = RNA
  misc_feature 13..23: note = RNA
  misc_feature 2: note = DNA
  misc_feature 5: note = DNA
  misc_feature 12: note = DNA
ttggactggacgttgctaagatc

SEQ ID NO: 486 - DNA, 23 bp, synthetic construct
  source 1..23: mol_type = other DNA
  modified_base 1: mod_base = OTHER; note = 2'-O-methyluridine-3'-phosphorothioate 5'-(E)-Vinylphosphonate
  modified_base 2: mod_base = OTHER; note = 2'-deoxythymidine-3'-phosphorothioate
  modified_base 3: mod_base = OTHER; note = 2'-O-methyluridine-3'-phosphate
  modified_base 4: mod_base = OTHER; note = 2'-O-methylguanosine-3'-phosphate
  modified_base 6: mod_base = OTHER; note = 2'-O-methyladenosine-3'-phosphate
  modified_base 7: mod_base = OTHER; note = cytidine-2'-phosphate
  modified_base 8: mod_base = OTHER; note = 2'-O-methyluridine-3'-phosphate
  modified_base 9: mod_base = OTHER; note = 2'-O-methylguanosine-3'-phosphate
  modified_base 10: mod_base = OTHER; note = 2'-O-methylguanosine-3'-phosphate
  modified_base 11: mod_base = OTHER; note = 2'-O-methyladenosine-3'-phosphate
  modified_base 13: mod_base = OTHER; note = 2'-O-methylguanosine-3'-phosphate
  modified_base 14: mod_base = OTHER; note = 2'-deoxy-2'-fluorouridine-3'-phosphate
  modified_base 15: mod_base = OTHER; note = 2'-O-methyluridine-3'-phosphate
  modified_base 16: mod_base = OTHER; note = 2'-O-methylguanosine-3'-phosphate
  modified_base 17: mod_base = OTHER; note = 2'-O-methylcytidine-3'-phosphate
  modified_base 18: mod_base = OTHER; note = 2'-O-methyluridine-3'-phosphate
  modified_base 19: mod_base = OTHER; note = 2'-O-methyladenosine-3'-phosphate
  modified_base 20: mod_base = OTHER; note = 2'-O-methyladenosine-3'-phosphate
  modified_base 21: mod_base = OTHER; note = 2'-O-methylguanosine-3'-phosphorothioate
  modified_base 22: mod_base = OTHER; note = 2'-O-methyladenosine-3'-phosphorothioate
  modified_base 23: mod_base = OTHER; note = 2'-O-methyluridine
  misc_feature 1: note = RNA
  misc_feature 3..4: note = RNA
  misc_feature 6..11: note = RNA
  misc_feature 13..23: note = RNA
  misc_feature 2: note = DNA
  misc_feature 5: note = DNA
  misc_feature 12: note = DNA
tttggactggacgttgctaagat

SEQ ID NO: 487 - DNA, 23 bp, synthetic construct
  source 1..23: mol_type = other DNA
  modified_base 1: mod_base = OTHER; note = 2'-O-methyluridine-3'-phosphorothioate 5'-(E)-Vinylphosphonate
  modified_base 2: mod_base = OTHER; note = 2'-deoxycytidine-3'-phosphorothioate
  modified_base 3: mod_base = OTHER; note = 2'-O-methyluridine-3'-phosphate
  modified_base 4: mod_base = OTHER; note = 2'-O-methyluridine-3'-phosphate
  modified_base 6: mod_base = OTHER; note = 2'-O-methylguanosine-3'-phosphate
  modified_base 7: mod_base = OTHER; note = Adenosine-glycol nucleic acid (GNA), S-isomer
  modified_base 8: mod_base = OTHER; note = 2'-O-methylcytidine-3'-phosphate
  modified_base 9: mod_base = OTHER; note = 2'-O-methyluridine-3'-phosphate
  modified_base 10: mod_base = OTHER; note = 2'-O-methylguanosine-3'-phosphate
  modified_base 11: mod_base = OTHER; note = 2'-O-methylguanosine-3'-phosphate
  modified_base 13: mod_base = OTHER; note = 2'-O-methylcytidine-3'-phosphate
  modified_base 14: mod_base = OTHER; note = 2'-deoxy-2'-fluoroguanosine-3'-phosphate
  modified_base 15: mod_base = OTHER; note = 2'-O-methyluridine-3'-phosphate
  modified_base 16: mod_base = OTHER; note = 2'-O-methyluridine-3'-phosphate
  modified_base 17: mod_base = OTHER; note = 2'-O-methylguanosine-3'-phosphate
  modified_base 18: mod_base = OTHER; note = 2'-O-methylcytidine-3'-phosphate
  modified_base 19: mod_base = OTHER; note = 2'-O-methyluridine-3'-phosphate
  modified_base 20: mod_base = OTHER; note = 2'-O-methyladenosine-3'-phosphate
  modified_base 21: mod_base = OTHER; note = 2'-O-methyladenosine-3'-phosphorothioate
  modified_base 22: mod_base = OTHER; note = 2'-O-methylguanosine-3'-phosphorothioate
  modified_base 23: mod_base = OTHER; note = 2'-O-methyladenosine
  misc_feature 1: note = RNA
  misc_feature 3..4: note = RNA
  misc_feature 6..11: note = RNA
  misc_feature 13..23: note = RNA
  misc_feature 2: note = DNA
  misc_feature 5: note = DNA
  misc_feature 12: note = DNA
tcttggactggacgttgctaaga

SEQ ID NO: 488 - DNA, 23 bp, synthetic construct
  source 1..23: mol_type = other DNA
  modified_base 1: mod_base = OTHER; note = 2'-O-methyluridine-3'-phosphorothioate 5'-(E)-Vinylphosphonate
  modified_base 2: mod_base = OTHER; note = 2'-deoxyadenosine-3'-phosphorothioate
  modified_base 3: mod_base = OTHER; note = 2'-O-methylcytidine-3'-phosphate
  modified_base 4: mod_base = OTHER; note = 2'-O-methyluridine-3'-phosphate
  modified_base 6: mod_base = OTHER; note = 2'-O-methylguanosine-3'-phosphate
  modified_base 7: mod_base = OTHER; note = guanosine-2'-phosphate
  modified_base 8: mod_base = OTHER; note = 2'-O-methyladenosine-3'-phosphate
  modified_base 9: mod_base = OTHER; note = 2'-O-methylcytidine-3'-phosphate
  modified_base 10: mod_base = OTHER; note = 2'-O-methyluridine-3'-phosphate
  modified_base 11: mod_base = OTHER; note = 2'-O-methylguanosine-3'-phosphate
  modified_base 13: mod_base = OTHER; note = 2'-O-methyladenosine-3'-phosphate
  modified_base 14: mod_base = OTHER; note = 2'-deoxy-2'-fluorocytidine-3'-phosphate
  modified_base 15: mod_base = OTHER; note = 2'-O-methylguanosine-3'-phosphate
  modified_base 16: mod_base = OTHER; note = 2'-O-methyluridine-3'-phosphate
  modified_base 17: mod_base = OTHER; note = 2'-O-methyluridine-3'-phosphate
  modified_base 18: mod_base = OTHER; note = 2'-O-methylguanosine-3'-phosphate
  modified_base 19: mod_base = OTHER; note = 2'-O-methylcytidine-3'-phosphate
  modified_base 20: mod_base = OTHER; note = 2'-O-methyluridine-3'-phosphate
  modified_base 21: mod_base = OTHER; note = 2'-O-methyladenosine-3'-phosphorothioate
  modified_base 22: mod_base = OTHER; note = 2'-O-methyladenosine-3'-phosphorothioate
  modified_base 23: mod_base = OTHER; note = 2'-O-methylguanosine
  misc_feature 1: note = RNA
  misc_feature 3..4: note = RNA
  misc_feature 6..11: note = RNA
  misc_feature 13..23: note = RNA
  misc_feature 2: note = DNA
  misc_feature 5: note = DNA
  misc_feature 12: note = DNA
tacttggactggacgttgctaag

SEQ ID NO: 489 - DNA, 23 bp, synthetic construct
  source 1..23: mol_type = other DNA
  modified_base 1: mod_base = OTHER; note = 2'-O-methyluridine-3'-phosphorothioate 5'-(E)-Vinylphosphonate
  modified_base 2: mod_base = OTHER; note = 2'-deoxycytidine-3'-phosphorothioate
  modified_base 3: mod_base = OTHER; note = 2'-O-methyladenosine-3'-phosphate
  modified_base 4: mod_base = OTHER; note = 2'-O-methylcytidine-3'-phosphate
  modified_base 6: mod_base = OTHER; note = 2'-O-methyluridine-3'-phosphate
  modified_base 7: mod_base = OTHER; note = guanosine-2'-phosphate
  modified_base 8: mod_base = OTHER; note = 2'-O-methylguanosine-3'-phosphate
  modified_base 9: mod_base = OTHER; note = 2'-O-methyladenosine-3'-phosphate
  modified_base 10: mod_base = OTHER; note = 2'-O-methylcytidine-3'-phosphate
  modified_base 11: mod_base = OTHER; note = 2'-O-methyluridine-3'-phosphate
  modified_base 13: mod_base = OTHER; note = 2'-O-methylguanosine-3'-phosphate
  modified_base 14: mod_base = OTHER; note = 2'-deoxy-2'-fluoroadenosine-3'-phosphate
  modified_base 15: mod_base = OTHER; note = 2'-O-methylcytidine-3'-phosphate
  modified_base 16: mod_base = OTHER; note = 2'-O-methylguanosine-3'-phosphate
  modified_base 17: mod_base = OTHER; note = 2'-O-methyluridine-3'-phosphate
  modified_base 18: mod_base = OTHER; note = 2'-O-methyluridine-3'-phosphate
  modified_base 19: mod_base = OTHER; note = 2'-O-methylguanosine-3'-phosphate
  modified_base 20: mod_base = OTHER; note = 2'-O-methylcytidine-3'-phosphate
  modified_base 21: mod_base = OTHER; note = 2'-O-methyluridine-3'-phosphorothioate
  modified_base 22: mod_base = OTHER; note = 2'-O-methyladenosine-3'-phosphorothioate
  modified_base 23: mod_base = OTHER; note = 2'-O-methyladenosine
  misc_feature 1: note = RNA
  misc_feature 3..4: note = RNA
  misc_feature 6..11: note = RNA
  misc_feature 13..23: note = RNA
  misc_feature 2: note = DNA
  misc_feature 5: note = DNA
  misc_feature 12: note = DNA
tcacttggactggacgttgctaa

SEQ ID NO: 490 - DNA, 23 bp, synthetic construct
  source 1..23: mol_type = other DNA
  modified_base 1: mod_base = OTHER; note = 2'-O-methyluridine-3'-phosphorothioate 5'-(E)-Vinylphosphonate
  modified_base 2: mod_base = OTHER; note = 2'-deoxyguanosine-3'-phosphorothioate
  modified_base 3: mod_base = OTHER; note = 2'-O-methylcytidine-3'-phosphate
  modified_base 4: mod_base = OTHER; note = 2'-O-methylcytidine-3'-phosphate
  modified_base 6: mod_base = OTHER; note = 2'-O-methylcytidine-3'-phosphate
  modified_base 7: mod_base = OTHER; note = Adenosine-glycol nucleic acid (GNA), S-isomer
  modified_base 8: mod_base = OTHER; note = 2'-O-methylcytidine-3'-phosphate
  modified_base 9: mod_base = OTHER; note = 2'-O-methyluridine-3'-phosphate
  modified_base 10: mod_base = OTHER; note = 2'-O-methyluridine-3'-phosphate
  modified_base 11: mod_base = OTHER; note = 2'-O-methylguanosine-3'-phosphate
  modified_base 13: mod_base = OTHER; note = 2'-O-methyladenosine-3'-phosphate
  modified_base 14: mod_base = OTHER; note = 2'-deoxy-2'-fluorocytidine-3'-phosphate
  modified_base 15: mod_base = OTHER; note = 2'-O-methyluridine-3'-phosphate
  modified_base 16: mod_base = OTHER; note = 2'-O-methylguanosine-3'-phosphate
  modified_base 17: mod_base = OTHER; note = 2'-O-methylguanosine-3'-phosphate
  modified_base 18: mod_base = OTHER; note = 2'-O-methyladenosine-3'-phosphate
  modified_base 19: mod_base = OTHER; note = 2'-O-methylcytidine-3'-phosphate
  modified_base 20: mod_base = OTHER; note = 2'-O-methylguanosine-3'-phosphate
  modified_base 21: mod_base = OTHER; note = 2'-O-methyluridine-3'-phosphorothioate
  modified_base 22: mod_base = OTHER; note = 2'-O-methyluridine-3'-phosphorothioate
  modified_base 23: mod_base = OTHER; note = 2'-O-methylguanosine
  misc_feature 1: note = RNA
  misc_feature 3..4: note = RNA
  misc_feature 6..11: note = RNA
  misc_feature 13..23: note = RNA
  misc_feature 2: note = DNA
  misc_feature 5: note = DNA
  misc_feature 12: note = DNA
tgccacacttggactggacgttg

SEQ ID NO: 491 - DNA, 23 bp, synthetic construct
  source 1..23: mol_type = other DNA
  modified_base 1: mod_base = OTHER; note = 2'-O-methyluridine-3'-phosphorothioate 5'-(E)-Vinylphosphonate
  modified_base 2: mod_base = OTHER; note = 2'-deoxyadenosine-3'-phosphorothioate
  modified_base 3: mod_base = OTHER; note = 2'-O-methylguanosine-3'-phosphate
  modified_base 4: mod_base = OTHER; note = 2'-O-methylcytidine-3'-phosphate
  modified_base 6: mod_base = OTHER; note = 2'-O-methyladenosine-3'-phosphate
  modified_base 7: mod_base = OTHER; note = cytidine-2'-phosphate
  modified_base 8: mod_base = OTHER; note = 2'-O-methyladenosine-3'-phosphate
  modified_base 9: mod_base = OTHER; note = 2'-O-methylcytidine-3'-phosphate
  modified_base 10: mod_base = OTHER; note = 2'-O-methyluridine-3'-phosphate
  modified_base 11: mod_base = OTHER; note = 2'-O-methyluridine-3'-phosphate
  modified_base 13: mod_base = OTHER; note = 2'-O-methylguanosine-3'-phosphate
  modified_base 14: mod_base = OTHER; note = 2'-deoxy-2'-fluoroadenosine-3'-phosphate
  modified_base 15: mod_base = OTHER; note = 2'-O-methylcytidine-3'-phosphate
  modified_base 16: mod_base = OTHER; note = 2'-O-methyluridine-3'-phosphate
  modified_base 17: mod_base = OTHER; note = 2'-O-methylguanosine-3'-phosphate
  modified_base 18: mod_base = OTHER; note = 2'-O-methylguanosine-3'-phosphate
  modified_base 19: mod_base = OTHER; note = 2'-O-methyladenosine-3'-phosphate
  modified_base 20: mod_base = OTHER; note = 2'-O-methylcytidine-3'-phosphate
  modified_base 21: mod_base = OTHER; note = 2'-O-methylguanosine-3'-phosphorothioate
  modified_base 22: mod_base = OTHER; note = 2'-O-methyluridine-3'-phosphorothioate
  modified_base 23: mod_base = OTHER; note = 2'-O-methyluridine
  misc_feature 1: note = RNA
  misc_feature 3..4: note = RNA
  misc_feature 6..11: note = RNA
  misc_feature 13..23: note = RNA
  misc_feature 2: note = DNA
  misc_feature 5: note = DNA
  misc_feature 12: note = DNA
tagccacacttggactggacgtt

SEQ ID NO: 492 - DNA, 23 bp, synthetic construct
  source 1..23: mol_type = other DNA
  modified_base 1: mod_base = OTHER; note = 2'-O-methyluridine-3'-phosphorothioate 5'-(E)-Vinylphosphonate
  modified_base 2: mod_base = OTHER; note = 2'-deoxyguanosine-3'-phosphorothioate
  modified_base 3: mod_base = OTHER; note = 2'-O-methyladenosine-3'-phosphate
  modified_base 4: mod_base = OTHER; note = 2'-O-methylguanosine-3'-phosphate
  modified_base 6: mod_base = OTHER; note = 2'-O-methylcytidine-3'-phosphate
  modified_base 7: mod_base = OTHER; note = Adenosine-glycol nucleic acid (GNA), S-isomer
  modified_base 8: mod_base = OTHER; note = 2'-O-methylcytidine-3'-phosphate
  modified_base 9: mod_base = OTHER; note = 2'-O-methyladenosine-3'-phosphate
  modified_base 10: mod_base = OTHER; note = 2'-O-methylcytidine-3'-phosphate
  modified_base 11: mod_base = OTHER; note = 2'-O-methyluridine-3'-phosphate
  modified_base 13: mod_base = OTHER; note = 2'-O-methylguanosine-3'-phosphate
  modified_base 14: mod_base = OTHER; note = 2'-deoxy-2'-fluoroguanosine-3'-phosphate
  modified_base 15: mod_base = OTHER; note = 2'-O-methyladenosine-3'-phosphate
  modified_base 16: mod_base = OTHER; note = 2'-O-methylcytidine-3'-phosphate
  modified_base 17: mod_base = OTHER; note = 2'-O-methyluridine-3'-phosphate
  modified_base 18: mod_base = OTHER; note = 2'-O-methylguanosine-3'-phosphate
  modified_base 19: mod_base = OTHER; note = 2'-O-methylguanosine-3'-phosphate
  modified_base 20: mod_base = OTHER; note = 2'-O-methyladenosine-3'-phosphate
  modified_base 21: mod_base = OTHER; note = 2'-O-methylcytidine-3'-phosphorothioate
  modified_base 22: mod_base = OTHER; note = 2'-O-methylguanosine-3'-phosphorothioate
  modified_base 23: mod_base = OTHER; note = 2'-O-methyluridine
  misc_feature 1: note = RNA
  misc_feature 3..4: note = RNA
  misc_feature 6..11: note = RNA
  misc_feature 13..23: note = RNA
  misc_feature 2: note = DNA
  misc_feature 5: note = DNA
  misc_feature 12: note = DNA
tgagccacacttggactggacgt

SEQ ID NO: 493 - DNA, 23 bp, synthetic construct
  source 1..23: mol_type = other DNA
  modified_base 1: mod_base = OTHER; note = 2'-O-methyluridine-3'-phosphorothioate 5'-(E)-Vinylphosphonate
  modified_base 2: mod_base = OTHER; note = 2'-deoxythymidine-3'-phosphorothioate
  modified_base 3: mod_base = OTHER; note = 2'-O-methylguanosine-3'-phosphate
  modified_base 4: mod_base = OTHER; note = 2'-O-methyladenosine-3'-phosphate
  modified_base 6: mod_base = OTHER; note = 2'-O-methylcytidine-3'-phosphate
  modified_base 7: mod_base = OTHER; note = cytidine-2'-phosphate
  modified_base 8: mod_base = OTHER; note = 2'-O-methyladenosine-3'-phosphate
  modified_base 9: mod_base = OTHER; note = 2'-O-methylcytidine-3'-phosphate
  modified_base 10: mod_base = OTHER; note = 2'-O-methyladenosine-3'-phosphate
  modified_base 11: mod_base = OTHER; note = 2'-O-methylcytidine-3'-phosphate
  modified_base 13: mod_base = OTHER; note = 2'-O-methyluridine-3'-phosphate
  modified_base 14: mod_base = OTHER; note = 2'-deoxy-2'-fluoroguanosine-3'-phosphate
  modified_base 15: mod_base = OTHER; note = 2'-O-methylguanosine-3'-phosphate
  modified_base 16: mod_base = OTHER; note = 2'-O-methyladenosine-3'-phosphate
  modified_base 17: mod_base = OTHER; note = 2'-O-methylcytidine-3'-phosphate
  modified_base 18: mod_base = OTHER; note = 2'-O-methyluridine-3'-phosphate
  modified_base 19: mod_base = OTHER; note = 2'-O-methylguanosine-3'-phosphate
  modified_base 20: mod_base = OTHER; note = 2'-O-methylguanosine-3'-phosphate
  modified_base 21: mod_base = OTHER; note = 2'-O-methyladenosine-3'-phosphorothioate
  modified_base 22: mod_base = OTHER; note = 2'-O-methylcytidine-3'-phosphorothioate
  modified_base 23: mod_base = OTHER; note = 2'-O-methylguanosine
  misc_feature 1: note = RNA
  misc_feature 3..4: note = RNA
  misc_feature 6..11: note = RNA
  misc_feature 13..23: note = RNA
  misc_feature 2: note = DNA
  misc_feature 5: note = DNA
  misc_feature 12: note = DNA
ttgagccacacttggactggacg

SEQ ID NO: 494 - DNA, 23 bp, synthetic construct
  source 1..23: mol_type = other DNA
  modified_base 1: mod_base = OTHER; note = 2'-O-methyluridine-3'-phosphorothioate 5'-(E)-Vinylphosphonate
  modified_base 2: mod_base = OTHER; note = 2'-deoxythymidine-3'-phosphorothioate
  modified_base 3: mod_base = OTHER; note = 2'-O-methyluridine-3'-phosphate
  modified_base 4: mod_base = OTHER; note = 2'-O-methylguanosine-3'-phosphate
  modified_base 6: mod_base = OTHER; note = 2'-O-methylguanosine-3'-phosphate
  modified_base 7: mod_base = OTHER; note = cytidine-2'-phosphate
  modified_base 8: mod_base = OTHER; note = 2'-O-methylcytidine-3'-phosphate
  modified_base 9: mod_base = OTHER; note = 2'-O-methyladenosine-3'-phosphate
  modified_base 10: mod_base = OTHER; note = 2'-O-methylcytidine-3'-phosphate
  modified_base 11: mod_base = OTHER; note = 2'-O-methyladenosine-3'-phosphate
  modified_base 13: mod_base = OTHER; note = 2'-O-methyluridine-3'-phosphate
  modified_base 14: mod_base = OTHER; note = 2'-deoxy-2'-fluorouridine-3'-phosphate
  modified_base 15: mod_base = OTHER; note = 2'-O-methylguanosine-3'-phosphate
  modified_base 16: mod_base = OTHER; note = 2'-O-methylguanosine-3'-phosphate
  modified_base 17: mod_base = OTHER; note = 2'-O-methyladenosine-3'-phosphate
  modified_base 18: mod_base = OTHER; note = 2'-O-methylcytidine-3'-phosphate
  modified_base 19: mod_base = OTHER; note = 2'-O-methyluridine-3'-phosphate
  modified_base 20: mod_base = OTHER; note = 2'-O-methylguanosine-3'-phosphate
  modified_base 21: mod_base = OTHER; note = 2'-O-methylguanosine-3'-phosphorothioate
  modified_base 22: mod_base = OTHER; note = 2'-O-methyladenosine-3'-phosphorothioate
  modified_base 23: mod_base = OTHER; note = 2'-O-methylcytidine
  misc_feature 1: note = RNA
  misc_feature 3..4: note = RNA
  misc_feature 6..11: note = RNA
  misc_feature 13..23: note = RNA
  misc_feature 2: note = DNA
  misc_feature 5: note = DNA
  misc_feature 12: note = DNA
tttgagccacacttggactggac

SEQ ID NO: 495 - DNA, 23 bp, synthetic construct
  source 1..23: mol_type = other DNA
  modified_base 1: mod_base = OTHER; note = 2'-O-methyluridine-3'-phosphorothioate 5'-(E)-Vinylphosphonate
  modified_base 2: mod_base = OTHER; note = 2'-deoxythymidine-3'-phosphorothioate
  modified_base 3: mod_base = OTHER; note = 2'-O-methyluridine-3'-phosphate
  modified_base 4: mod_base = OTHER; note = 2'-O-methyluridine-3'-phosphate
  modified_base 6: mod_base = OTHER; note = 2'-O-methyladenosine-3'-phosphate
  modified_base 7: mod_base = OTHER; note = guanosine-2'-phosphate
  modified_base 8: mod_base = OTHER; note = 2'-O-methylcytidine-3'-phosphate
  modified_base 9: mod_base = OTHER; note = 2'-O-methylcytidine-3'-phosphate
  modified_base 10: mod_base = OTHER; note = 2'-O-methyladenosine-3'-phosphate
  modified_base 11: mod_base = OTHER; note = 2'-O-methylcytidine-3'-phosphate
  modified_base 13: mod_base = OTHER; note = 2'-O-methylcytidine-3'-phosphate
  modified_base 14: mod_base = OTHER; note = 2'-deoxy-2'-fluorouridine-3'-phosphate
  modified_base 15: mod_base = OTHER; note = 2'-O-methyluridine-3'-phosphate
  modified_base 16: mod_base = OTHER; note = 2'-O-methylguanosine-3'-phosphate
  modified_base 17: mod_base = OTHER; note = 2'-O-methylguanosine-3'-phosphate
  modified_base 18: mod_base = OTHER; note = 2'-O-methyladenosine-3'-phosphate
  modified_base 19: mod_base = OTHER; note = 2'-O-methylcytidine-3'-phosphate
  modified_base 20: mod_base = OTHER; note = 2'-O-methyluridine-3'-phosphate
  modified_base 21: mod_base = OTHER; note = 2'-O-methylguanosine-3'-phosphorothioate
  modified_base 22: mod_base = OTHER; note = 2'-O-methylguanosine-3'-phosphorothioate
  modified_base 23: mod_base = OTHER; note = 2'-O-methyladenosine
  misc_feature 1: note = RNA
  misc_feature 3..4: note = RNA
  misc_feature 6..11: note = RNA
  misc_feature 13..23: note = RNA
  misc_feature 2: note = DNA
  misc_feature 5: note = DNA
  misc_feature 12: note = DNA
ttttgagccacacttggactgga

SEQ ID NO: 496 - DNA, 23 bp, synthetic construct
  source 1..23: mol_type = other DNA
  modified_base 1: mod_base = OTHER; note = 2'-O-methyluridine-3'-phosphorothioate 5'-(E)-Vinylphosphonate
  modified_base 2: mod_base = OTHER; note = 2'-deoxycytidine-3'-phosphorothioate
  modified_base 3: mod_base = OTHER; note = 2'-O-methyluridine-3'-phosphate
  modified_base 4: mod_base = OTHER; note = 2'-O-methyluridine-3'-phosphate
  modified_base 6: mod_base = OTHER; note = 2'-O-methylguanosine-3'-phosphate
  modified_base 7: mod_base = OTHER; note = Adenosine-glycol nucleic acid (GNA), S-isomer
  modified_base 8: mod_base = OTHER; note = 2'-O-methylguanosine-3'-phosphate
  modified_base 9: mod_base = OTHER; note = 2'-O-methylcytidine-3'-phosphate
  modified_base 10: mod_base = OTHER; note = 2'-O-methylcytidine-3'-phosphate
  modified_base 11: mod_base = OTHER; note = 2'-O-methyladenosine-3'-phosphate
  modified_base 13: mod_base = OTHER; note = 2'-O-methyladenosine-3'-phosphate
  modified_base 14: mod_base = OTHER; note = 2'-deoxy-2'-fluorocytidine-3'-phosphate
  modified_base 15: mod_base = OTHER; note = 2'-O-methyluridine-3'-phosphate
  modified_base 16: mod_base = OTHER; note = 2'-O-methyluridine-3'-phosphate
  modified_base 17: mod_base = OTHER; note = 2'-O-methylguanosine-3'-phosphate
  modified_base 18: mod_base = OTHER; note = 2'-O-methylguanosine-3'-phosphate
  modified_base 19: mod_base = OTHER; note = 2'-O-methyladenosine-3'-phosphate
  modified_base 20: mod_base = OTHER; note = 2'-O-methylcytidine-3'-phosphate
  modified_base 21: mod_base = OTHER; note = 2'-O-methyluridine-3'-phosphorothioate
  modified_base 22: mod_base = OTHER; note = 2'-O-methylguanosine-3'-phosphorothioate
  modified_base 23: mod_base = OTHER; note = 2'-O-methylguanosine
  misc_feature 1: note = RNA
  misc_feature 3..4: note = RNA
  misc_feature 6..11: note = RNA
  misc_feature 13..23: note = RNA
  misc_feature 2: note = DNA
  misc_feature 5: note = DNA
  misc_feature 12: note = DNA
tctttgagccacacttggactgg

SEQ ID NO: 497 - DNA, 23 bp, synthetic construct
  source 1..23: mol_type = other DNA
  modified_base 1: mod_base = OTHER; note = 2'-O-methyluridine-3'-phosphorothioate 5'-(E)-Vinylphosphonate
  modified_base 2: mod_base = OTHER; note = 2'-deoxythymidine-3'-phosphorothioate
  modified_base 3: mod_base = OTHER; note = 2'-O-methyladenosine-3'-phosphate
  modified_base 4: mod_base = OTHER; note = 2'-O-methyluridine-3'-phosphate
  modified_base 6: mod_base = OTHER; note = 2'-O-methylcytidine-3'-phosphate
  modified_base 7: mod_base = OTHER; note = Thymidine-glycol nucleic acid (GNA), S-Isomer
  modified_base 8: mod_base = OTHER; note = 2'-O-methyluridine-3'-phosphate
  modified_base 9: mod_base = OTHER; note = 2'-O-methyluridine-3'-phosphate
  modified_base 10: mod_base = OTHER; note = 2'-O-methylguanosine-3'-phosphate
  modified_base 11: mod_base = OTHER; note = 2'-O-methyladenosine-3'-phosphate
  modified_base 13: mod_base = OTHER; note = 2'-O-methylcytidine-3'-phosphate
  modified_base 14: mod_base = OTHER; note = 2'-deoxy-2'-fluorocytidine-3'-phosphate
  modified_base 15: mod_base = OTHER; note = 2'-O-methyladenosine-3'-phosphate
  modified_base 16: mod_base = OTHER; note = 2'-O-methylcytidine-3'-phosphate
  modified_base 17: mod_base = OTHER; note = 2'-O-methyladenosine-3'-phosphate
  modified_base 18: mod_base = OTHER; note = 2'-O-methylcytidine-3'-phosphate
  modified_base 19: mod_base = OTHER; note = 2'-O-methyluridine-3'-phosphate
  modified_base 20: mod_base = OTHER; note = 2'-O-methyluridine-3'-phosphate
  modified_base 21: mod_base = OTHER; note = 2'-O-methylguanosine-3'-phosphorothioate
  modified_base 22: mod_base = OTHER; note = 2'-O-methylguanosine-3'-phosphorothioate
  modified_base 23: mod_base = OTHER; note = 2'-O-methyladenosine
  misc_feature 1: note = RNA
  misc_feature 3..4: note = RNA
  misc_feature 6..11: note = RNA
  misc_feature 13..23: note = RNA
  misc_feature 2: note = DNA
  misc_feature 5: note = DNA
  misc_feature 12: note = DNA
ttatcctttgagccacacttgga

SEQ ID NO: 498 - DNA, 23 bp, synthetic construct
  source 1..23: mol_type = other DNA
  modified_base 1: mod_base = OTHER; note = 2'-O-methyluridine-3'-phosphorothioate 5'-(E)-Vinylphosphonate
  modified_base 2: mod_base = OTHER; note = 2'-deoxythymidine-3'-phosphorothioate
  modified_base 3: mod_base = OTHER; note = 2'-O-methyluridine-3'-phosphate
  modified_base 4: mod_base = OTHER; note = 2'-O-methyladenosine-3'-phosphate
  modified_base 6: mod_base = OTHER; note = 2'-O-methylcytidine-3'-phosphate
  modified_base 7: mod_base = OTHER; note = cytidine-2'-phosphate
  modified_base 8: mod_base = OTHER; note = 2'-O-methyluridine-3'-phosphate
  modified_base 9: mod_base = OTHER; note = 2'-O-methyluridine-3'-phosphate
  modified_base 10: mod_base = OTHER; note = 2'-O-methyluridine-3'-phosphate
  modified_base 11: mod_base = OTHER; note = 2'-O-methylguanosine-3'-phosphate
  modified_base 13: mod_base = OTHER; note = 2'-O-methylguanosine-3'-phosphate
  modified_base 14: mod_base = OTHER; note = 2'-deoxy-2'-fluorocytidine-3'-phosphate
  modified_base 15: mod_base = OTHER; note = 2'-O-methylcytidine-3'-phosphate
  modified_base 16: mod_base = OTHER; note = 2'-O-methyladenosine-3'-phosphate
  modified_base 17: mod_base = OTHER; note = 2'-O-methylcytidine-3'-phosphate
  modified_base 18: mod_base = OTHER; note = 2'-O-methyladenosine-3'-phosphate
  modified_base 19: mod_base = OTHER; note = 2'-O-methylcytidine-3'-phosphate
  modified_base 20: mod_base = OTHER; note = 2'-O-methyluridine-3'-phosphate
  modified_base 21: mod_base = OTHER; note = 2'-O-methyluridine-3'-phosphorothioate
  modified_base 22: mod_base = OTHER; note = 2'-O-methylguanosine-3'-phosphorothioate
  modified_base 23: mod_base = OTHER; note = 2'-O-methylguanosine
  misc_feature 1: note = RNA
  misc_feature 3..4: note = RNA
  misc_feature 6..11: note = RNA
  misc_feature 13..23: note = RNA
  misc_feature 2: note = DNA
  misc_feature 5: note = DNA
  misc_feature 12: note = DNA
tttatcctttgagccacacttgg

SEQ ID NO: 499 - DNA, 23 bp, synthetic construct
  source 1..23: mol_type = other DNA
  modified_base 1: mod_base = OTHER; note = 2'-O-methyluridine-3'-phosphorothioate 5'-(E)-Vinylphosphonate
  modified_base 2: mod_base = OTHER; note = 2'-deoxyadenosine-3'-phosphorothioate
  modified_base 3: mod_base = OTHER; note = 2'-O-methyluridine-3'-phosphate
  modified_base 4: mod_base = OTHER; note = 2'-O-methyluridine-3'-phosphate
  modified_base 6: mod_base = OTHER; note = 2'-O-methyluridine-3'-phosphate
  modified_base 7: mod_base = OTHER; note = cytidine-2'-phosphate
  modified_base 8: mod_base = OTHER; note = 2'-O-methylcytidine-3'-phosphate
  modified_base 9: mod_base = OTHER; note = 2'-O-methyluridine-3'-phosphate
  modified_base 10: mod_base = OTHER; note = 2'-O-methyluridine-3'-phosphate
  modified_base 11: mod_base = OTHER; note = 2'-O-methyluridine-3'-phosphate
  modified_base 13: mod_base = OTHER; note = 2'-O-methyladenosine-3'-phosphate
  modified_base 14: mod_base = OTHER; note = 2'-deoxy-2'-fluoroguanosine-3'-phosphate
  modified_base 15: mod_base = OTHER; note = 2'-O-methylcytidine-3'-phosphate
  modified_base 16: mod_base = OTHER; note = 2'-O-methylcytidine-3'-phosphate
  modified_base 17: mod_base = OTHER; note = 2'-O-methyladenosine-3'-phosphate
  modified_base 18: mod_base = OTHER; note = 2'-O-methylcytidine-3'-phosphate
  modified_base 19: mod_base = OTHER; note = 2'-O-methyladenosine-3'-phosphate
  modified_base 20: mod_base = OTHER; note = 2'-O-methylcytidine-3'-phosphate
  modified_base 21: mod_base = OTHER; note = 2'-O-methyluridine-3'-phosphorothioate
  modified_base 22: mod_base = OTHER; note = 2'-O-methyluridine-3'-phosphorothioate
  modified_base 23: mod_base = OTHER; note = 2'-O-methylguanosine
  misc_feature 1: note = RNA
  misc_feature 3..4: note = RNA
  misc_feature 6..11: note = RNA
  misc_feature 13..23: note = RNA
  misc_feature 2: note = DNA
  misc_feature 5: note = DNA
  misc_feature 12: note = DNA
tattatcctttgagccacacttg

SEQ ID NO: 500 - DNA, 23 bp, synthetic construct
  source 1..23: mol_type = other DNA
  modified_base 1: mod_base = OTHER; note = 2'-O-methyluridine-3'-phosphorothioate 5'-(E)-Vinylphosphonate
  modified_base 2: mod_base = OTHER; note = 2'-deoxythymidine-3'-phosphorothioate
  modified_base 3: mod_base = OTHER; note = 2'-O-methyladenosine-3'-phosphate
  modified_base 4: mod_base = OTHER; note = 2'-O-methyluridine-3'-phosphate
  modified_base 6: mod_base = OTHER; note = 2'-O-methyladenosine-3'-phosphate
  modified_base 7: mod_base = OTHER; note = Thymidine-glycol nucleic acid (GNA), S-Isomer
  modified_base 8: mod_base = OTHER; note = 2'-O-methylcytidine-3'-phosphate
  modified_base 9: mod_base = OTHER; note = 2'-O-methylcytidine-3'-phosphate
  modified_base 10: mod_base = OTHER; note = 2'-O-methyluridine-3'-phosphate
  modified_base 11: mod_base = OTHER; note = 2'-O-methyluridine-3'-phosphate
  modified_base 13: mod_base = OTHER; note = 2'-O-methylguanosine-3'-phosphate
  modified_base 14: mod_base = OTHER; note = 2'-deoxy-2'-fluoroadenosine-3'-phosphate
  modified_base 15: mod_base = OTHER; note = 2'-O-methylguanosine-3'-phosphate
  modified_base 16: mod_base = OTHER; note = 2'-O-methylcytidine-3'-phosphate
  modified_base 17: mod_base = OTHER; note = 2'-O-methylcytidine-3'-phosphate
  modified_base 18: mod_base = OTHER; note = 2'-O-methyladenosine-3'-phosphate
  modified_base 19: mod_base = OTHER; note = 2'-O-methylcytidine-3'-phosphate
  modified_base 20: mod_base = OTHER; note = 2'-O-methyladenosine-3'-phosphate
  modified_base 21: mod_base = OTHER; note = 2'-O-methylcytidine-3'-phosphorothioate
  modified_base 22: mod_base = OTHER; note = 2'-O-methyluridine-3'-phosphorothioate
  modified_base 23: mod_base = OTHER; note = 2'-O-methyluridine
  misc_feature 1: note = RNA
  misc_feature 3..4: note = RNA
  misc_feature 6..11: note = RNA
  misc_feature 13..23: note = RNA
  misc_feature 2: note = DNA
  misc_feature 5: note = DNA
  misc_feature 12: note = DNA
ttattatcctttgagccacactt

SEQ ID NO: 501 - DNA, 23 bp, synthetic construct
  source 1..23: mol_type = other DNA
  modified_base 1: mod_base = OTHER; note = 2'-O-methyluridine-3'-phosphorothioate 5'-(E)-Vinylphosphonate
  modified_base 2: mod_base = OTHER; note = 2'-deoxyadenosine-3'-phosphorothioate
  modified_base 3: mod_base = OTHER; note = 2'-O-methyluridine-3'-phosphate
  modified_base 4: mod_base = OTHER; note = 2'-O-methyladenosine-3'-phosphate
  modified_base 6: mod_base = OTHER; note = 2'-O-methyluridine-3'-phosphate
  modified_base 7: mod_base = OTHER; note = Adenosine-glycol nucleic acid (GNA), S-isomer
  modified_base 8: mod_base = OTHER; note = 2'-O-methyluridine-3'-phosphate
  modified_base 9: mod_base = OTHER; note = 2'-O-methylcytidine-3'-phosphate
  modified_base 10: mod_base = OTHER; note = 2'-O-methylcytidine-3'-phosphate
  modified_base 11: mod_base = OTHER; note = 2'-O-methyluridine-3'-phosphate
  modified_base 13: mod_base = OTHER; note = 2'-O-methyluridine-3'-phosphate
  modified_base 14: mod_base = OTHER; note = 2'-deoxy-2'-fluoroguanosine-3'-phosphate
  modified_base 15: mod_base = OTHER; note = 2'-O-methyladenosine-3'-phosphate
  modified_base 16: mod_base = OTHER; note = 2'-O-methylguanosine-3'-phosphate
  modified_base 17: mod_base = OTHER; note = 2'-O-methylcytidine-3'-phosphate
  modified_base 18: mod_base = OTHER; note = 2'-O-methylcytidine-3'-phosphate
  modified_base 19: mod_base = OTHER; note = 2'-O-methyladenosine-3'-phosphate
  modified_base 20: mod_base = OTHER; note = 2'-O-methylcytidine-3'-phosphate
  modified_base 21: mod_base = OTHER; note = 2'-O-methyladenosine-3'-phosphorothioate
  modified_base 22: mod_base = OTHER; note = 2'-O-methylcytidine-3'-phosphorothioate
  modified_base 23: mod_base = OTHER; note = 2'-O-methyluridine
  misc_feature 1: note = RNA
  misc_feature 3..4: note = RNA
  misc_feature 6..11: note = RNA
  misc_feature 13..23: note = RNA
  misc_feature 2: note = DNA
  misc_feature 5: note = DNA
  misc_feature 12: note = DNA
tatattatcctttgagccacact

SEQ ID NO: 502 - DNA, 23 bp, synthetic construct
  source 1..23: mol_type = other DNA
  modified_base 1: mod_base = OTHER; note = 2'-O-methyluridine-3'-phosphorothioate 5'-(E)-Vinylphosphonate
  modified_base 2: mod_base = OTHER; note = 2'-deoxythymidine-3'-phosphorothioate
  modified_base 3: mod_base = OTHER; note = 2'-O-methylguanosine-3'-phosphate
  modified_base 4: mod_base = OTHER; note = 2'-O-methyladenosine-3'-phosphate
  modified_base 6: mod_base = OTHER; note = 2'-O-methyladenosine-3'-phosphate
  modified_base 7: mod_base = OTHER; note = Thymidine-glycol nucleic acid (GNA), S-Isomer
  modified_base 8: mod_base = OTHER; note = 2'-O-methyluridine-3'-phosphate
  modified_base 9: mod_base = OTHER; note = 2'-O-methyladenosine-3'-phosphate
  modified_base 10: mod_base = OTHER; note = 2'-O-methyluridine-3'-phosphate
  modified_base 11: mod_base = OTHER; note = 2'-O-methylcytidine-3'-phosphate
  modified_base 13: mod_base = OTHER; note = 2'-O-methyluridine-3'-phosphate
  modified_base 14: mod_base = OTHER; note = 2'-deoxy-2'-fluorouridine-3'-phosphate
  modified_base 15: mod_base = OTHER; note = 2'-O-methyluridine-3'-phosphate
  modified_base 16: mod_base = OTHER; note = 2'-O-methylguanosine-3'-phosphate
  modified_base 17: mod_base = OTHER; note = 2'-O-methyladenosine-3'-phosphate
  modified_base 18: mod_base = OTHER; note = 2'-O-methylguanosine-3'-phosphate
  modified_base 19: mod_base = OTHER; note = 2'-O-methylcytidine-3'-phosphate
  modified_base 20: mod_base = OTHER; note = 2'-O-methylcytidine-3'-phosphate
  modified_base 21: mod_base = OTHER; note = 2'-O-methyladenosine-3'-phosphorothioate
  modified_base 22: mod_base = OTHER; note = 2'-O-methylcytidine-3'-phosphorothioate
  modified_base 23: mod_base = OTHER; note = 2'-O-methyladenosine
  misc_feature 1: note = RNA
  misc_feature 3..4: note = RNA
  misc_feature 6..11: note = RNA
  misc_feature 13..23: note = RNA
  misc_feature 2: note = DNA
  misc_feature 5: note = DNA
  misc_feature 12: note = DNA
ttgatattatcctttgagccaca

SEQ ID NO: 503 - DNA, 23 bp, synthetic construct
  source 1..23: mol_type = other DNA
  modified_base 1: mod_base = OTHER; note = 2'-O-methyluridine-3'-phosphorothioate 5'-(E)-Vinylphosphonate
  modified_base 2: mod_base = OTHER; note = 2'-deoxythymidine-3'-phosphorothioate
  modified_base 3: mod_base = OTHER; note = 2'-O-methyluridine-3'-phosphate
  modified_base 4: mod_base = OTHER; note = 2'-O-methyluridine-3'-phosphate
  modified_base 6: mod_base = OTHER; note = 2'-O-methyladenosine-3'-phosphate
  modified_base 7: mod_base = OTHER; note = Thymidine-glycol nucleic acid (GNA), S-Isomer
  modified_base 8: mod_base = OTHER; note = 2'-O-methyladenosine-3'-phosphate
  modified_base 9: mod_base = OTHER; note = 2'-O-methyluridine-3'-phosphate
  modified_base 10: mod_base = OTHER; note = 2'-O-methyluridine-3'-phosphate
  modified_base 11: mod_base = OTHER; note = 2'-O-methyladenosine-3'-phosphate
  modified_base 13: mod_base = OTHER; note = 2'-O-methylcytidine-3'-phosphate
  modified_base 14: mod_base = OTHER; note = 2'-deoxy-2'-fluorocytidine-3'-phosphate
  modified_base 15: mod_base = OTHER; note = 2'-O-methyluridine-3'-phosphate
  modified_base 16: mod_base = OTHER; note = 2'-O-methyluridine-3'-phosphate
  modified_base 17: mod_base = OTHER; note = 2'-O-methyluridine-3'-phosphate
  modified_base 18: mod_base = OTHER; note = 2'-O-methylguanosine-3'-phosphate
  modified_base 19: mod_base = OTHER; note = 2'-O-methyladenosine-3'-phosphate
  modified_base 20: mod_base = OTHER; note = 2'-O-methylguanosine-3'-phosphate
  modified_base 21: mod_base = OTHER; note = 2'-O-methylcytidine-3'-phosphorothioate
  modified_base 22: mod_base = OTHER; note = 2'-O-methylcytidine-3'-phosphorothioate
  modified_base 23: mod_base = OTHER; note = 2'-O-methyladenosine
  misc_feature 1: note = RNA
  misc_feature 3..4: note = RNA
  misc_feature 6..11: note = RNA
  misc_feature 13..23: note = RNA
  misc_feature 2: note = DNA
  misc_feature 5: note = DNA
  misc_feature 12: note = DNA
ttttgatattatcctttgagcca

SEQ ID NO: 504 - DNA, 23 bp, synthetic construct
  source 1..23: mol_type = other DNA
  modified_base 1: mod_base = OTHER; note = 2'-O-methyluridine-3'-phosphorothioate 5'-(E)-Vinylphosphonate
  modified_base 2: mod_base = OTHER; note = 2'-deoxyguanosine-3'-phosphorothioate
  modified_base 3: mod_base = OTHER; note = 2'-O-methyluridine-3'-phosphate
  modified_base 4: mod_base = OTHER; note = 2'-O-methyluridine-3'-phosphate
  modified_base 6: mod_base = OTHER; note = 2'-O-methylguanosine-3'-phosphate
  modified_base 7: mod_base = OTHER; note = Adenosine-glycol nucleic acid (GNA), S-isomer
  modified_base 8: mod_base = OTHER; note = 2'-O-methyluridine-3'-phosphate
  modified_base 9: mod_base = OTHER; note = 2'-O-methyladenosine-3'-phosphate
  modified_base 10: mod_base = OTHER; note = 2'-O-methyluridine-3'-phosphate
  modified_base 11: mod_base = OTHER; note = 2'-O-methyluridine-3'-phosphate
  modified_base 13: mod_base = OTHER; note = 2'-O-methyluridine-3'-phosphate
  modified_base 14: mod_base = OTHER; note = 2'-deoxy-2'-fluorocytidine-3'-phosphate
  modified_base 15: mod_base = OTHER; note = 2'-O-methylcytidine-3'-phosphate
  modified_base 16: mod_base = OTHER; note = 2'-O-methyluridine-3'-phosphate
  modified_base 17: mod_base = OTHER; note = 2'-O-methyluridine-3'-phosphate
  modified_base 18: mod_base = OTHER; note = 2'-O-methyluridine-3'-phosphate
  modified_base 19: mod_base = OTHER; note = 2'-O-methylguanosine-3'-phosphate
  modified_base 20: mod_base = OTHER; note = 2'-O-methyladenosine-3'-phosphate
  modified_base 21: mod_base = OTHER; note = 2'-O-methylguanosine-3'-phosphorothioate
  modified_base 22: mod_base = OTHER; note = 2'-O-methylcytidine-3'-phosphorothioate
  modified_base 23: mod_base = OTHER; note = 2'-O-methylcytidine
  misc_feature 1: note = RNA
  misc_feature 3..4: note = RNA
  misc_feature 6..11: note = RNA
  misc_feature 13..23: note = RNA
  misc_feature 2: note = DNA
  misc_feature 5: note = DNA
  misc_feature 12: note = DNA
tgtttgatattatcctttgagcc

SEQ ID NO: 505 - DNA, 23 bp, synthetic construct
  source 1..23: mol_type = other DNA
  modified_base 1: mod_base = OTHER; note = 2'-O-methyluridine-3'-phosphorothioate 5'-(E)-Vinylphosphonate
  modified_base 2: mod_base = OTHER; note = 2'-deoxycytidine-3'-phosphorothioate
  modified_base 3: mod_base = OTHER; note = 2'-O-methylguanosine-3'-phosphate
  modified_base 4: mod_base = OTHER; note = 2'-O-methyluridine-3'-phosphate
  modified_base 6: mod_base = OTHER; note = 2'-O-methyluridine-3'-phosphate
  modified_base 7: mod_base = OTHER; note = Thymidine-glycol nucleic acid (GNA), S-Isomer
  modified_base 8: mod_base = OTHER; note = 2'-O-methyluridine-3'-phosphate
  modified_base 9: mod_base = OTHER; note = 2'-O-methylguanosine-3'-phosphate
  modified_base 10: mod_base = OTHER; note = 2'-O-methyladenosine-3'-phosphate
  modified_base 11: mod_base = OTHER; note = 2'-O-methyluridine-3'-phosphate
  modified_base 13: mod_base = OTHER; note = 2'-O-methyluridine-3'-phosphate
  modified_base 14: mod_base = OTHER; note = 2'-deoxy-2'-fluorouridine-3'-phosphate
  modified_base 15: mod_base = OTHER; note = 2'-O-methyladenosine-3'-phosphate
  modified_base 16: mod_base = OTHER; note = 2'-O-methyluridine-3'-phosphate
  modified_base 17: mod_base = OTHER; note = 2'-O-methylcytidine-3'-phosphate
  modified_base 18: mod_base = OTHER; note = 2'-O-methylcytidine-3'-phosphate
  modified_base 19: mod_base = OTHER; note = 2'-O-methyluridine-3'-phosphate
  modified_base 20: mod_base = OTHER; note = 2'-O-methyluridine-3'-phosphate
  modified_base 21: mod_base = OTHER; note = 2'-O-methyluridine-3'-phosphorothioate
  modified_base 22: mod_base = OTHER; note = 2'-O-methylguanosine-3'-phosphorothioate
  modified_base 23: mod_base = OTHER; note = 2'-O-methyladenosine
  misc_feature 1: note = RNA
  misc_feature 3..4: note = RNA
  misc_feature 6..11: note = RNA
  misc_feature 13..23: note = RNA
  misc_feature 2: note = DNA
  misc_feature 5: note = DNA
  misc_feature 12: note = DNA
tcgtgtttgatattatcctttga

SEQ ID NO: 506 - DNA, 23 bp, synthetic construct
  source 1..23: mol_type = other DNA
  modified_base 1: mod_base = OTHER; note = 2'-O-methyluridine-3'-phosphorothioate 5'-(E)-Vinylphosphonate
  modified_base 2: mod_base = OTHER; note = 2'-deoxyadenosine-3'-phosphorothioate
  modified_base 3: mod_base = OTHER; note = 2'-O-methylcytidine-3'-phosphate
  modified_base 4: mod_base = OTHER; note = 2'-O-methylguanosine-3'-phosphate
  modified_base 6: mod_base = OTHER; note = 2'-O-methylguanosine-3'-phosphate
  modified_base 7: mod_base = OTHER; note = Thymidine-glycol nucleic acid (GNA), S-Isomer
  modified_base 8: mod_base = OTHER; note = 2'-O-methyluridine-3'-phosphate
  modified_base 9: mod_base = OTHER; note = 2'-O-methyluridine-3'-phosphate
  modified_base 10: mod_base = OTHER; note = 2'-O-methylguanosine-3'-phosphate
  modified_base 11: mod_base = OTHER; note = 2'-O-methyladenosine-3'-phosphate
  modified_base 13: mod_base = OTHER; note = 2'-O-methyladenosine-3'-phosphate
  modified_base 14: mod_base = OTHER; note = 2'-deoxy-2'-fluorouridine-3'-phosphate
  modified_base 15: mod_base = OTHER; note = 2'-O-methyluridine-3'-phosphate
  modified_base 16: mod_base = OTHER; note = 2'-O-methyladenosine-3'-phosphate
  modified_base 17: mod_base = OTHER; note = 2'-O-methyluridine-3'-phosphate
  modified_base 18: mod_base = OTHER; note = 2'-O-methylcytidine-3'-phosphate
  modified_base 19: mod_base = OTHER; note = 2'-O-methylcytidine-3'-phosphate
  modified_base 20: mod_base = OTHER; note = 2'-O-methyluridine-3'-phosphate
  modified_base 21: mod_base = OTHER; note = 2'-O-methyluridine-3'-phosphorothioate
  modified_base 22: mod_base = OTHER; note = 2'-O-methyluridine-3'-phosphorothioate
  modified_base 23: mod_base = OTHER; note = 2'-O-methylguanosine
  misc_feature 1: note = RNA
  misc_feature 3..4: note = RNA
  misc_feature 6..11: note = RNA
  misc_feature 13..23: note = RNA
  misc_feature 2: note = DNA
  misc_feature 5: note = DNA
  misc_feature 12: note = DNA
tacgtgtttgatattatcctttg

SEQ ID NO: 507 - DNA, 23 bp, synthetic construct
  source 1..23: mol_type = other DNA
  modified_base 1: mod_base = OTHER; note = 2'-O-methyluridine-3'-phosphorothioate 5'-(E)-Vinylphosphonate
  modified_base 2: mod_base = OTHER; note = 2'-deoxyguanosine-3'-phosphorothioate
  modified_base 3: mod_base = OTHER; note = 2'-O-methyladenosine-3'-phosphate
  modified_base 4: mod_base = OTHER; note = 2'-O-methylcytidine-3'-phosphate
  modified_base 6: mod_base = OTHER; note = 2'-O-methyluridine-3'-phosphate
  modified_base 7: mod_base = OTHER; note = guanosine-2'-phosphate
  modified_base 8: mod_base = OTHER; note = 2'-O-methyluridine-3'-phosphate
  modified_base 9: mod_base = OTHER; note = 2'-O-methyluridine-3'-phosphate
  modified_base 10: mod_base = OTHER; note = 2'-O-methyluridine-3'-phosphate
  modified_base 11: mod_base = OTHER; note = 2'-O-methylguanosine-3'-phosphate
  modified_base 13: mod_base = OTHER; note = 2'-O-methyluridine-3'-phosphate
  modified_base 14: mod_base = OTHER; note = 2'-deoxy-2'-fluoroadenosine-3'-phosphate
  modified_base 15: mod_base = OTHER; note = 2'-O-methyluridine-3'-phosphate
  modified_base 16: mod_base = OTHER; note = 2'-O-methyluridine-3'-phosphate
  modified_base 17: mod_base = OTHER; note = 2'-O-methyladenosine-3'-phosphate
  modified_base 18: mod_base = OTHER; note = 2'-O-methyluridine-3'-phosphate
  modified_base 19: mod_base = OTHER; note = 2'-O-methylcytidine-3'-phosphate
  modified_base 20: mod_base = OTHER; note = 2'-O-methylcytidine-3'-phosphate
  modified_base 21: mod_base = OTHER; note = 2'-O-methyluridine-3'-phosphorothioate
  modified_base 22: mod_base = OTHER; note = 2'-O-methyluridine-3'-phosphorothioate
  modified_base 23: mod_base = OTHER; note = 2'-O-methyluridine
  misc_feature 1: note = RNA
  misc_feature 3..4: note = RNA
  misc_feature 6..11: note = RNA
  misc_feature 13..23: note = RNA
  misc_feature 2: note = DNA
  misc_feature 5: note = DNA
  misc_feature 12: note = DNA
tgacgtgtttgatattatccttt

SEQ ID NO: 508 - DNA, 23 bp, synthetic construct
  source 1..23: mol_type = other DNA
  modified_base 1: mod_base = OTHER; note = 2'-O-methyluridine-3'-phosphorothioate 5'-(E)-Vinylphosphonate
  modified_base 2: mod_base = OTHER; note = 2'-deoxyguanosine-3'-phosphorothioate
  modified_base 3: mod_base = OTHER; note = 2'-O-methylguanosine-3'-phosphate
  modified_base 4: mod_base = OTHER; note = 2'-O-methylguanosine-3'-phosphate
  modified_base 6: mod_base = OTHER; note = 2'-O-methylcytidine-3'-phosphate
  modified_base 7: mod_base = OTHER; note = guanosine-2'-phosphate
  modified_base 8: mod_base = OTHER; note = 2'-O-methyluridine-3'-phosphate
  modified_base 9: mod_base = OTHER; note = 2'-O-methylguanosine-3'-phosphate
  modified_base 10: mod_base = OTHER; note = 2'-O-methyluridine-3'-phosphate
  modified_base 11: mod_base = OTHER; note = 2'-O-methyluridine-3'-phosphate
  modified_base 13: mod_base = OTHER; note = 2'-O-methylguanosine-3'-phosphate
  modified_base 14: mod_base = OTHER; note = 2'-deoxy-2'-fluoroadenosine-3'-phosphate
  modified_base 15: mod_base = OTHER; note = 2'-O-methyluridine-3'-phosphate
  modified_base 16: mod_base = OTHER; note = 2'-O-methyladenosine-3'-phosphate
  modified_base 17: mod_base = OTHER; note = 2'-O-methyluridine-3'-phosphate
  modified_base 18: mod_base = OTHER; note = 2'-O-methyluridine-3'-phosphate
  modified_base 19: mod_base = OTHER; note = 2'-O-methyladenosine-3'-phosphate
  modified_base 20: mod_base = OTHER; note = 2'-O-methyluridine-3'-phosphate
  modified_base 21: mod_base = OTHER; note = 2'-O-methylcytidine-3'-phosphorothioate
  modified_base 22: mod_base = OTHER; note = 2'-O-methylcytidine-3'-phosphorothioate
  modified_base 23: mod_base = OTHER; note = 2'-O-methyluridine
  misc_feature 1: note = RNA
  misc_feature 3..4: note = RNA
  misc_feature 6..11: note = RNA
  misc_feature 13..23: note = RNA
  misc_feature 2: note = DNA
  misc_feature 5: note = DNA
  misc_feature 12: note = DNA
tgggacgtgtttgatattatcct

SEQ ID NO: 509 - DNA, 23 bp, synthetic construct
  source 1..23: mol_type = other DNA
  modified_base 1: mod_base = OTHER; note = 2'-O-methyluridine-3'-phosphorothioate 5'-(E)-Vinylphosphonate
  modified_base 2: mod_base = OTHER; note = 2'-deoxycytidine-3'-phosphorothioate
  modified_base 3: mod_base = OTHER; note = 2'-O-methylcytidine-3'-phosphate
  modified_base 4: mod_base = OTHER; note = 2'-O-methylguanosine-3'-phosphate
  modified_base 6: mod_base = OTHER; note = 2'-O-methylguanosine-3'-phosphate
  modified_base 7: mod_base = OTHER; note = Adenosine-glycol nucleic acid (GNA), S-isomer
  modified_base 8: mod_base = OTHER; note = 2'-O-methylcytidine-3'-phosphate
  modified_base 9: mod_base = OTHER; note = 2'-O-methylguanosine-3'-phosphate
  modified_base 10: mod_base = OTHER; note = 2'-O-methyluridine-3'-phosphate
  modified_base 11: mod_base = OTHER; note = 2'-O-methylguanosine-3'-phosphate
  modified_base 13: mod_base = OTHER; note = 2'-O-methyluridine-3'-phosphate
  modified_base 14: mod_base = OTHER; note = 2'-deoxy-2'-fluorouridine-3'-phosphate
  modified_base 15: mod_base = OTHER; note = 2'-O-methylguanosine-3'-phosphate
  modified_base 16: mod_base = OTHER; note = 2'-O-methyladenosine-3'-phosphate
  modified_base 17: mod_base = OTHER; note = 2'-O-methyluridine-3'-phosphate
  modified_base 18: mod_base = OTHER; note = 2'-O-methyladenosine-3'-phosphate
  modified_base 19: mod_base = OTHER; note = 2'-O-methyluridine-3'-phosphate
  modified_base 20: mod_base = OTHER; note = 2'-O-methyluridine-3'-phosphate
  modified_base 21: mod_base = OTHER; note = 2'-O-methyladenosine-3'-phosphorothioate
  modified_base 22: mod_base = OTHER; note = 2'-O-methyluridine-3'-phosphorothioate
  modified_base 23: mod_base = OTHER; note = 2'-O-methylcytidine
  misc_feature 1: note = RNA
  misc_feature 3..4: note = RNA
  misc_feature 6..11: note = RNA
  misc_feature 13..23: note = RNA
  misc_feature 2: note = DNA
  misc_feature 5: note = DNA
  misc_feature 12: note = DNA
tccgggacgtgtttgatattatc

SEQ ID NO: 510 - DNA, 23 bp, synthetic construct
  source 1..23: mol_type = other DNA
  modified_base 1: mod_base = OTHER; note = 2'-O-methyluridine-3'-phosphorothioate 5'-(E)-Vinylphosphonate
  modified_base 2: mod_base = OTHER; note = 2'-deoxythymidine-3'-phosphorothioate
  modified_base 3: mod_base = OTHER; note = 2'-O-methylcytidine-3'-phosphate
  modified_base 4: mod_base = OTHER; note = 2'-O-methylcytidine-3'-phosphate
  modified_base 6: mod_base = OTHER; note = 2'-O-methylguanosine-3'-phosphate
  modified_base 7: mod_base = OTHER; note = guanosine-2'-phosphate
  modified_base 8: mod_base = OTHER; note = 2'-O-methylguanosine-3'-phosphate
  modified_base 9: mod_base = OTHER; note = 2'-O-methyladenosine-3'-phosphate
  modified_base 10: mod_base = OTHER; note = 2'-O-methylcytidine-3'-phosphate
  modified_base 11: mod_base = OTHER; note = 2'-O-methylguanosine-3'-phosphate
  modified_base 13: mod_base = OTHER; note = 2'-O-methylguanosine-3'-phosphate
  modified_base 14: mod_base = OTHER; note = 2'-deoxy-2'-fluorouridine-3'-phosphate
  modified_base 15: mod_base = OTHER; note = 2'-O-methyluridine-3'-phosphate
  modified_base 16: mod_base = OTHER; note = 2'-O-methyluridine-3'-phosphate
  modified_base 17: mod_base = OTHER; note = 2'-O-methylguanosine-3'-phosphate
  modified_base 18: mod_base = OTHER; note = 2'-O-methyladenosine-3'-phosphate
  modified_base 19: mod_base = OTHER; note = 2'-O-methyluridine-3'-phosphate
  modified_base 20: mod_base = OTHER; note = 2'-O-methyladenosine-3'-phosphate
  modified_base 21: mod_base = OTHER; note = 2'-O-methyluridine-3'-phosphorothioate
  modified_base 22: mod_base = OTHER; note = 2'-O-methyluridine-3'-phosphorothioate
  modified_base 23: mod_base = OTHER; note = 2'-O-methyladenosine
  misc_feature 1: note = RNA
  misc_feature 3..4: note = RNA
  misc_feature 6..11: note = RNA
  misc_feature 13..23: note = RNA
  misc_feature 2: note = DNA
  misc_feature 5: note = DNA
  misc_feature 12: note = DNA
ttcccgggacgtgtttgatatta

SEQ ID NO: 511 - DNA, 23 bp, synthetic construct
  source 1..23: mol_type = other DNA
  modified_base 1: mod_base = OTHER; note = 2'-O-methyluridine-3'-phosphorothioate 5'-(E)-Vinylphosphonate
  modified_base 2: mod_base = OTHER; note = 2'-deoxyguanosine-3'-phosphorothioate
  modified_base 3: mod_base = OTHER; note = 2'-O-methylcytidine-3'-phosphate
  modified_base 4: mod_base = OTHER; note = 2'-O-methylcytidine-3'-phosphate
  modified_base 6: mod_base = OTHER; note = 2'-O-methylcytidine-3'-phosphate
  modified_base 7: mod_base = OTHER; note = cytidine-2'-phosphate
  modified_base 8: mod_base = OTHER; note = 2'-O-methylcytidine-3'-phosphate
  modified_base 9: mod_base = OTHER; note = 2'-O-methylguanosine-3'-phosphate
  modified_base 10: mod_base = OTHER; note = 2'-O-methylguanosine-3'-phosphate
  modified_base 11: mod_base = OTHER; note = 2'-O-methylguanosine-3'-phosphate
  modified_base 13: mod_base = OTHER; note = 2'-O-methylcytidine-3'-phosphate
  modified_base 14: mod_base = OTHER; note = 2'-deoxy-2'-fluoroguanosine-3'-phosphate
  modified_base 15: mod_base = OTHER; note = 2'-O-methyluridine-3'-phosphate
  modified_base 16: mod_base = OTHER; note = 2'-O-methylguanosine-3'-phosphate
  modified_base 17: mod_base = OTHER; note = 2'-O-methyluridine-3'-phosphate
  modified_base 18: mod_base = OTHER; note = 2'-O-methyluridine-3'-phosphate
  modified_base 19: mod_base = OTHER; note = 2'-O-methyluridine-3'-phosphate
  modified_base 20: mod_base = OTHER; note = 2'-O-methylguanosine-3'-phosphate
  modified_base 21: mod_base = OTHER; note = 2'-O-methyladenosine-3'-phosphorothioate
  modified_base 22: mod_base = OTHER; note = 2'-O-methyluridine-3'-phosphorothioate
  modified_base 23: mod_base = OTHER; note = 2'-O-methyladenosine
  misc_feature 1: note = RNA
  misc_feature 3..4: note = RNA
  misc_feature 6..11: note = RNA
  misc_feature 13..23: note = RNA
  misc_feature 2: note = DNA
  misc_feature 5: note = DNA
  misc_feature 12: note = DNA
tgcctcccgggacgtgtttgata

SEQ ID NO: 512 - DNA, 23 bp, synthetic construct
  source 1..23: mol_type = other DNA
  modified_base 1: mod_base = OTHER; note = 2'-O-methyluridine-3'-phosphorothioate 5'-(E)-Vinylphosphonate
  modified_base 2: mod_base = OTHER; note = 2'-deoxycytidine-3'-phosphorothioate
  modified_base 3: mod_base = OTHER; note = 2'-O-methylguanosine-3'-phosphate
  modified_base 4: mod_base = OTHER; note = 2'-O-methylcytidine-3'-phosphate
  modified_base 6: mod_base = OTHER; note = 2'-O-methyluridine-3'-phosphate
  modified_base 7: mod_base = OTHER; note = cytidine-2'-phosphate
  modified_base 8: mod_base = OTHER; note = 2'-O-methylcytidine-3'-phosphate
  modified_base 9: mod_base = OTHER; note = 2'-O-methylcytidine-3'-phosphate
  modified_base 10: mod_base = OTHER; note = 2'-O-methylguanosine-3'-phosphate
  modified_base 11: mod_base = OTHER; note = 2'-O-methylguanosine-3'-phosphate
  modified_base 13: mod_base = OTHER; note = 2'-O-methyladenosine-3'-phosphate
  modified_base 14: mod_base = OTHER; note = 2'-deoxy-2'-fluorocytidine-3'-phosphate
  modified_base 15: mod_base = OTHER; note = 2'-O-methylguanosine-3'-phosphate
  modified_base 16: mod_base = OTHER; note = 2'-O-methyluridine-3'-phosphate
  modified_base 17: mod_base = OTHER; note = 2'-O-methylguanosine-3'-phosphate
  modified_base 18: mod_base = OTHER; note = 2'-O-methyluridine-3'-phosphate
  modified_base 19: mod_base = OTHER; note = 2'-O-methyluridine-3'-phosphate
  modified_base 20: mod_base = OTHER; note = 2'-O-methyluridine-3'-phosphate
  modified_base 21: mod_base = OTHER; note = 2'-O-methylguanosine-3'-phosphorothioate
  modified_base 22: mod_base = OTHER; note = 2'-O-methyladenosine-3'-phosphorothioate
  modified_base 23: mod_base = OTHER; note = 2'-O-methyluridine
  misc_feature 1: note = RNA
  misc_feature 3..4: note = RNA
  misc_feature 6..11: note = RNA
  misc_feature 13..23: note = RNA
  misc_feature 2: note = DNA
  misc_feature 5: note = DNA
  misc_feature 12: note = DNA
tcgcctcccgggacgtgtttgat

SEQ ID NO: 513 - DNA, 23 bp, synthetic construct
  source 1..23: mol_type = other DNA
  modified_base 1: mod_base = OTHER; note = 2'-O-methyluridine-3'-phosphorothioate 5'-(E)-Vinylphosphonate
  modified_base 2: mod_base = OTHER; note = 2'-deoxycytidine-3'-phosphorothioate
  modified_base 3: mod_base = OTHER; note = 2'-O-methylcytidine-3'-phosphate
  modified_base 4: mod_base = OTHER; note = 2'-O-methylguanosine-3'-phosphate
  modified_base 6: mod_base = OTHER; note = 2'-O-methylcytidine-3'-phosphate
  modified_base 7: mod_base = OTHER; note = Thymidine-glycol nucleic acid (GNA), S-Isomer
  modified_base 8: mod_base = OTHER; note = 2'-O-methylcytidine-3'-phosphate
  modified_base 9: mod_base = OTHER; note = 2'-O-methylcytidine-3'-phosphate
  modified_base 10: mod_base = OTHER; note = 2'-O-methylcytidine-3'-phosphate
  modified_base 11: mod_base = OTHER; note = 2'-O-methylguanosine-3'-phosphate
  modified_base 13: mod_base = OTHER; note = 2'-O-methylguanosine-3'-phosphate
  modified_base 14: mod_base = OTHER; note = 2'-deoxy-2'-fluoroadenosine-3'-phosphate
  modified_base 15: mod_base = OTHER; note = 2'-O-methylcytidine-3'-phosphate
  modified_base 16: mod_base = OTHER; note = 2'-O-methylguanosine-3'-phosphate
  modified_base 17: mod_base = OTHER; note = 2'-O-methyluridine-3'-phosphate
  modified_base 18: mod_base = OTHER; note = 2'-O-methylguanosine-3'-phosphate
  modified_base 19: mod_base = OTHER; note = 2'-O-methyluridine-3'-phosphate
  modified_base 20: mod_base = OTHER; note = 2'-O-methyluridine-3'-phosphate
  modified_base 21: mod_base = OTHER; note = 2'-O-methyluridine-3'-phosphorothioate
  modified_base 22: mod_base = OTHER; note = 2'-O-methylguanosine-3'-phosphorothioate
  modified_base 23: mod_base = OTHER; note = 2'-O-methyladenosine
  misc_feature 1: note = RNA
  misc_feature 3..4: note = RNA
  misc_feature 6..11: note = RNA
  misc_feature 13..23: note = RNA
  misc_feature 2: note = DNA
  misc_feature 5: note = DNA
  misc_feature 12: note = DNA
tccgcctcccgggacgtgtttga

SEQ ID NO: 514 - DNA, 23 bp, synthetic construct
  source 1..23: mol_type = other DNA
  modified_base 1: mod_base = OTHER; note = 2'-O-methyluridine-3'-phosphorothioate 5'-(E)-Vinylphosphonate
  modified_base 2: mod_base = OTHER; note = 2'-deoxyguanosine-3'-phosphorothioate
  modified_base 3: mod_base = OTHER; note = 2'-O-methylcytidine-3'-phosphate
  modified_base 4: mod_base = OTHER; note = 2'-O-methylcytidine-3'-phosphate
  modified_base 6: mod_base = OTHER; note = 2'-O-methylcytidine-3'-phosphate
  modified_base 7: mod_base = OTHER; note = cytidine-2'-phosphate
  modified_base 8: mod_base = OTHER; note = 2'-O-methyluridine-3'-phosphate
  modified_base 9: mod_base = OTHER; note = 2'-O-methylcytidine-3'-phosphate
  modified_base 10: mod_base = OTHER; note = 2'-O-methylcytidine-3'-phosphate
  modified_base 11: mod_base = OTHER; note = 2'-O-methylcytidine-3'-phosphate
  modified_base 13: mod_base = OTHER; note = 2'-O-methylguanosine-3'-phosphate
  modified_base 14: mod_base = OTHER; note = 2'-deoxy-2'-fluoroguanosine-3'-phosphate
  modified_base 15: mod_base = OTHER; note = 2'-O-methyladenosine-3'-phosphate
  modified_base 16: mod_base = OTHER; note = 2'-O-methylcytidine-3'-phosphate
  modified_base 17: mod_base = OTHER; note = 2'-O-methylguanosine-3'-phosphate
  modified_base 18: mod_base = OTHER; note = 2'-O-methyluridine-3'-phosphate
  modified_base 19: mod_base = OTHER; note = 2'-O-methylguanosine-3'-phosphate
  modified_base 20: mod_base = OTHER; note = 2'-O-methyluridine-3'-phosphate
  modified_base 21: mod_base = OTHER; note = 2'-O-methyluridine-3'-phosphorothioate
  modified_base 22: mod_base = OTHER; note = 2'-O-methyluridine-3'-phosphorothioate
  modified_base 23: mod_base = OTHER; note = 2'-O-methylguanosine
  misc_feature 1: note = RNA
  misc_feature 3..4: note = RNA
  misc_feature 6..11: note = RNA
  misc_feature 13..23: note = RNA
  misc_feature 2: note = DNA
  misc_feature 5: note = DNA
  misc_feature 12: note = DNA
tgccgcctcccgggacgtgtttg

SEQ ID NO: 515 - RNA, 23 nt, synthetic construct
  source 1..23: mol_type = other RNA
gataatatcaaacacgtcccggg

SEQ ID NO: 516 - RNA, 23 nt, synthetic construct
  source 1..23: mol_type = other RNA
taatatcaaacacgtcccgggag

SEQ ID NO: 517 - RNA, 23 nt, synthetic construct
  source 1..23: mol_type = other RNA
tatcaaacacgtcccgggaggcg

SEQ ID NO: 518 - RNA, 23 nt, synthetic construct
  source 1..23: mol_type = other RNA
atcaaacacgtcccgggaggcgg

SEQ ID NO: 519 - RNA, 23 nt, synthetic construct
  source 1..23: mol_type = other RNA
tcaaacacgtcccgggaggcggc

SEQ ID NO: 520 - RNA, 23 nt, synthetic construct
  source 1..23: mol_type = other RNA
caaacacgtcccgggaggcggca

SEQ ID NO: 521 - RNA, 23 nt, synthetic construct
  source 1..23: mol_type = other RNA
aaacacgtcccgggaggcggcag

SEQ ID NO: 522 - RNA, 23 nt, synthetic construct
  source 1..23: mol_type = other RNA
aacacgtcccgggaggcggcagt

SEQ ID NO: 523 - RNA, 23 nt, synthetic construct
  source 1..23: mol_type = other RNA
gtgcagataattaataagaagct

SEQ ID NO: 524 - RNA, 23 nt, synthetic construct
  source 1..23: mol_type = other RNA
tgcagataattaataagaagctg

SEQ ID NO: 525 - RNA, 23 nt, synthetic construct
  source 1..23: mol_type = other RNA
cagataattaataagaagctgga

SEQ ID NO: 526 - RNA, 23 nt, synthetic construct
  source 1..23: mol_type = other RNA
agataattaataagaagctggat

SEQ ID NO: 527 - RNA, 23 nt, synthetic construct
  source 1..23: mol_type = other RNA
gataattaataagaagctggatc

SEQ ID NO: 528 - RNA, 23 nt, synthetic construct
  source 1..23: mol_type = other RNA
ataattaataagaagctggatct

SEQ ID NO: 529 - RNA, 23 nt, synthetic construct
  source 1..23: mol_type = other RNA
taattaataagaagctggatctt

SEQ ID NO: 530 - RNA, 23 nt, synthetic construct
  source 1..23: mol_type = other RNA
attaataagaagctggatcttag

SEQ ID NO: 531 - RNA, 23 nt, synthetic construct
  source 1..23: mol_type = other RNA
ttaataagaagctggatcttagc

SEQ ID NO: 532 - RNA, 23 nt, synthetic construct
  source 1..23: mol_type = other RNA
aataagaagctggatcttagcaa

SEQ ID NO: 533 - RNA, 23 nt, synthetic construct
  source 1..23: mol_type = other RNA
ataagaagctggatcttagcaac

SEQ ID NO: 534 - RNA, 23 nt, synthetic construct
  source 1..23: mol_type = other RNA
taagaagctggatcttagcaacg

SEQ ID NO: 535 - RNA, 23 nt, synthetic construct
  source 1..23: mol_type = other RNA
aagaagctggatcttagcaacgt

SEQ ID NO: 536 - RNA, 23 nt, synthetic construct
  source 1..23: mol_type = other RNA
agaagctggatcttagcaacgtc

SEQ ID NO: 537 - RNA, 23 nt, synthetic construct
  source 1..23: mol_type = other RNA
agctggatcttagcaacgtccag

SEQ ID NO: 538 - RNA, 23 nt, synthetic construct
  source 1..23: mol_type = other RNA
ctggatcttagcaacgtccagtc

SEQ ID NO: 539 - RNA, 23 nt, synthetic construct
  source 1..23: mol_type = other RNA
tggatcttagcaacgtccagtcc

SEQ ID NO: 540 - RNA, 23 nt, synthetic construct
  source 1..23: mol_type = other RNA
ggatcttagcaacgtccagtcca

SEQ ID NO: 541 - RNA, 23 nt, synthetic construct
  source 1..23: mol_type = other RNA
gatcttagcaacgtccagtccaa

SEQ ID NO: 542 - RNA, 23 nt, synthetic construct
  source 1..23: mol_type = other RNA
atcttagcaacgtccagtccaag

SEQ ID NO: 543 - RNA, 23 nt, synthetic construct
  source 1..23: mol_type = other RNA
tcttagcaacgtccagtccaagt

SEQ ID NO: 544 - RNA, 23 nt, synthetic construct
  source 1..23: mol_type = other RNA
cttagcaacgtccagtccaagtg

SEQ ID NO: 545 - RNA, 23 nt, synthetic construct
  source 1..23: mol_type = other RNA
ttagcaacgtccagtccaagtgt

SEQ ID NO: 546 - RNA, 23 nt, synthetic construct
  source 1..23: mol_type = other RNA
caacgtccagtccaagtgtggct

SEQ ID NO: 547 - RNA, 23 nt, synthetic construct
  source 1..23: mol_type = other RNA
aacgtccagtccaagtgtggctc

SEQ ID NO: 548 - RNA, 23 nt, synthetic construct
  source 1..23: mol_type = other RNA
acgtccagtccaagtgtggctca

SEQ ID NO: 549 - RNA, 23 nt, synthetic construct
  source 1..23: mol_type = other RNA
cgtccagtccaagtgtggctcaa

SEQ ID NO: 550 - RNA, 23 nt, synthetic construct
  source 1..23: mol_type = other RNA
gtccagtccaagtgtggctcaaa

SEQ ID NO: 551 - RNA, 23 nt, synthetic construct
  source 1..23: mol_type = other RNA
tccagtccaagtgtggctcaaag

SEQ ID NO: 552 - RNA, 23 nt, synthetic construct
  source 1..23: mol_type = other RNA
ccagtccaagtgtggctcaaagg

SEQ ID NO: 553 - RNA, 23 nt, synthetic construct
  source 1..23: mol_type = other RNA
tccaagtgtggctcaaaggataa

SEQ ID NO: 554 - RNA, 23 nt, synthetic construct
  source 1..23: mol_type = other RNA
ccaagtgtggctcaaaggataat

SEQ ID NO: 555 - RNA, 23 nt, synthetic construct
  source 1..23: mol_type = other RNA
caagtgtggctcaaaggataata

SEQ ID NO: 556 - RNA, 23 nt, synthetic construct
  source 1..23: mol_type = other RNA
aagtgtggctcaaaggataatat

SEQ ID NO: 557 - RNA, 23 nt, synthetic construct
  source 1..23: mol_type = other RNA
agtgtggctcaaaggataatatc

SEQ ID NO: 558 - RNA, 23 nt, synthetic construct
  source 1..23: mol_type = other RNA
tgtggctcaaaggataatatcaa

SEQ ID NO: 559 - RNA, 23 nt, synthetic construct
  source 1..23: mol_type = other RNA
tggctcaaaggataatatcaaac

SEQ ID NO: 560 - RNA, 23 nt, synthetic construct
  source 1..23: mol_type = other RNA
ggctcaaaggataatatcaaaca

SEQ ID NO: 561 - RNA, 23 nt, synthetic construct
  source 1..23: mol_type = other RNA
tcaaaggataatatcaaacacgt

SEQ ID NO: 562 - RNA, 23 nt, synthetic construct
  source 1..23: mol_type = other RNA
caaaggataatatcaaacacgtc

SEQ ID NO: 563 - RNA, 23 nt, synthetic construct
  source 1..23: mol_type = other RNA
aaaggataatatcaaacacgtcc

SEQ ID NO: 564 - RNA, 23 nt, synthetic construct
  source 1..23: mol_type = other RNA
aggataatatcaaacacgtcccg

SEQ ID NO: 565 - RNA, 23 nt, synthetic construct
  source 1..23: mol_type = other RNA
gataatatcaaacacgtcccggg

SEQ ID NO: 566 - RNA, 23 nt, synthetic construct
  source 1..23: mol_type = other RNA
taatatcaaacacgtcccgggag

SEQ ID NO: 567 - RNA, 23 nt, synthetic construct
  source 1..23: mol_type = other RNA
tatcaaacacgtcccgggaggcg

SEQ ID NO: 568 - RNA, 23 nt, synthetic construct
  source 1..23: mol_type = other RNA
atcaaacacgtcccgggaggcgg

SEQ ID NO: 569 - RNA, 23 nt, synthetic construct
  source 1..23: mol_type = other RNA
tcaaacacgtcccgggaggcggc

SEQ ID NO: 570 - RNA, 23 nt, synthetic construct
  source 1..23: mol_type = other RNA
caaacacgtcccgggaggcggca

SEQ ID NO: 571 - RNA, 93 nt, synthetic construct
  source 1..93: mol_type = other RNA
aaggtgcagataattaataagaagctggatcttagcaacgtccagtccaagtgtggctcaaaggataatatcaaacacgtcccgggaggcggc

SEQ ID NO: 572 - RNA, 93 nt, synthetic construct
  source 1..93: mol_type = other RNA
ctgcagacagcccccgtgcccatgccagacctgaagaatgtcaagtccaagatcggctccactgagaacctgaagcaccagccgggaggcggg

SEQ ID NO: 573 - RNA, 93 nt, synthetic construct
  source 1..93: mol_type = other RNA
agtgtgcaaatagtctacaaaccagttgacctgagcaaggtgacctccaagtgtggctcattaggcaacatccatcataaaccaggaggtggc

SEQ ID NO: 574 - RNA, 96 nt, synthetic construct
  source 1..96: mol_type = other RNA
caggtggaagtaaaatctgagaagcttgacttcaaggacagagtccagtcgaagattgggtccctggacaatatcacccacgtccctggcggagga

SEQ ID NO: 575 - RNA, 21 nt, synthetic construct
  source 1..21: mol_type = other RNA
  modified_base 1: mod_base = OTHER; note = 2'-O-methyladenosine-3'-phosphorothioate
  modified_base 2: mod_base = OTHER; note = 2'-O-methylguanosine-3'-phosphorothioate
  modified_base 3: mod_base = OTHER; note = 2'-O-methyladenosine-3'-phosphate
  modified_base 4: mod_base = OTHER; note = 2'-O-methyluridine-3'-phosphate
  modified_base 5: mod_base = OTHER; note = 2'-O-methyladenosine-3'-phosphate
  modified_base 6: mod_base = OTHER; note = 2'-O-hexadecyl-adenosine-3'-phosphate
  modified_base 7: mod_base = OTHER; note = 2'-O-methyluridine-3'-phosphate
  modified_base 8: mod_base = OTHER; note = 2'-O-methyluridine-3'-phosphate
  modified_base 9: mod_base = OTHER; note = 2'-deoxy-2'-fluoroadenosine-3'-phosphate
  modified_base 10: mod_base = OTHER; note = 2'-deoxy-2'-fluoroadenosine-3'-phosphate
  modified_base 11: mod_base = OTHER; note = 2'-deoxy-2'-fluorouridine-3'-phosphate
  modified_base 12: mod_base = OTHER; note = 2'-O-methyladenosine-3'-phosphate
  modified_base 13: mod_base = OTHER; note = 2'-O-methyladenosine-3'-phosphate
  modified_base 14: mod_base = OTHER; note = 2'-O-methylguanosine-3'-phosphate
  modified_base 15: mod_base = OTHER; note = 2'-O-methyladenosine-3'-phosphate
  modified_base 16: mod_base = OTHER; note = 2'-O-methyladenosine-3'-phosphate
  modified_base 17: mod_base = OTHER; note = 2'-O-methylguanosine-3'-phosphate
  modified_base 18: mod_base = OTHER; note = 2'-O-methylcytidine-3'-phosphate
  modified_base 19: mod_base = OTHER; note = 2'-O-methyluridine-3'-phosphorothioate
  modified_base 20: mod_base = OTHER; note = 2'-O-methylguanosine-3'-phosphorothioate
  modified_base 21: mod_base = OTHER; note = 2'-O-methyladenosine
agataattaataagaagctga

SEQ ID NO: 576 - RNA, 21 nt, synthetic construct
  source 1..21: mol_type = other RNA
  modified_base 1: mod_base = OTHER; note = 2'-O-methyluridine-3'-phosphorothioate
  modified_base 2: mod_base = OTHER; note = 2'-O-methyluridine-3'-phosphorothioate
  modified_base 3: mod_base = OTHER; note = 2'-O-methyladenosine-3'-phosphate
  modified_base 4: mod_base = OTHER; note = 2'-O-methyladenosine-3'-phosphate
  modified_base 5: mod_base = OTHER; note = 2'-O-methyluridine-3'-phosphate
  modified_base 6: mod_base = OTHER; note = 2'-O-hexadecyl-adenosine-3'-phosphate
  modified_base 7: mod_base = OTHER; note = 2'-O-methyladenosine-3'-phosphate
  modified_base 8: mod_base = OTHER; note = 2'-O-methylguanosine-3'-phosphate
  modified_base 9: mod_base = OTHER; note = 2'-deoxy-2'-fluoroadenosine-3'-phosphate
  modified_base 10: mod_base = OTHER; note = 2'-deoxy-2'-fluoroadenosine-3'-phosphate
  modified_base 11: mod_base = OTHER; note = 2'-deoxy-2'-fluoroguanosine-3'-phosphate
  modified_base 12: mod_base = OTHER; note = 2'-O-methylcytidine-3'-phosphate
  modified_base 13: mod_base = OTHER; note = 2'-O-methyluridine-3'-phosphate
  modified_base 14: mod_base = OTHER; note = 2'-O-methylguanosine-3'-phosphate
  modified_base 15: mod_base = OTHER; note = 2'-O-methylguanosine-3'-phosphate
  modified_base 16: mod_base = OTHER; note = 2'-O-methyladenosine-3'-phosphate
  modified_base 17: mod_base = OTHER; note = 2'-O-methyluridine-3'-phosphate
  modified_base 18: mod_base = OTHER; note = 2'-O-methylcytidine-3'-phosphate
  modified_base 19: mod_base = OTHER; note = 2'-O-methyluridine-3'-phosphorothioate
  modified_base 20: mod_base = OTHER; note = 2'-O-methyluridine-3'-phosphorothioate
  modified_base 21: mod_base = OTHER; note = 2'-O-methyladenosine
ttaataagaagctggatctta

SEQ ID NO: 577 - RNA, 21 nt, synthetic construct
  source 1..21: mol_type = other RNA
  modified_base 1: mod_base = OTHER; note = 2'-O-methyladenosine-3'-phosphorothioate
  modified_base 2: mod_base = OTHER; note = 2'-O-methyluridine-3'-phosphorothioate
  modified_base 3: mod_base = OTHER; note = 2'-O-methyladenosine-3'-phosphate
  modified_base 4: mod_base = OTHER; note = 2'-O-methyladenosine-3'-phosphate
  modified_base 5: mod_base = OTHER; note = 2'-O-methylguanosine-3'-phosphate
  modified_base 6: mod_base = OTHER; note = 2'-O-hexadecyl-adenosine-3'-phosphate
  modified_base 7: mod_base = OTHER; note = 2'-O-methyladenosine-3'-phosphate
  modified_base 8: mod_base = OTHER; note = 2'-O-methylguanosine-3'-phosphate
  modified_base 9: mod_base = OTHER; note = 2'-deoxy-2'-fluorocytidine-3'-phosphate
  modified_base 10: mod_base = OTHER; note = 2'-deoxy-2'-fluorouridine-3'-phosphate
  modified_base 11: mod_base = OTHER; note = 2'-deoxy-2'-fluoroguanosine-3'-phosphate
  modified_base 12: mod_base = OTHER; note = 2'-O-methylguanosine-3'-phosphate
  modified_base 13: mod_base = OTHER; note = 2'-O-methyladenosine-3'-phosphate
  modified_base 14: mod_base = OTHER; note = 2'-O-methyluridine-3'-phosphate
  modified_base 15: mod_base = OTHER; note = 2'-O-methylcytidine-3'-phosphate
  modified_base 16: mod_base = OTHER; note = 2'-O-methyluridine-3'-phosphate
  modified_base 17: mod_base = OTHER; note = 2'-O-methyluridine-3'-phosphate
  modified_base 18: mod_base = OTHER; note = 2'-O-methyladenosine-3'-phosphate
  modified_base 19: mod_base = OTHER; note = 2'-O-methylguanosine-3'-phosphorothioate
  modified_base 20: mod_base = OTHER; note = 2'-O-methylcytidine-3'-phosphorothioate
  modified_base 21: mod_base = OTHER; note = 2'-O-methyladenosine
ataagaagctggatcttagca

SEQ ID NO: 578 - RNA, 21 nt, synthetic construct
  source 1..21: mol_type = other RNA
  modified_base 1: mod_base = OTHER; note = 2'-O-methyladenosine-3'-phosphorothioate
  modified_base 2: mod_base = OTHER; note = 2'-O-methylguanosine-3'-phosphorothioate
  modified_base 3: mod_base = OTHER; note = 2'-O-methylcytidine-3'-phosphate
  modified_base 4: mod_base = OTHER; note = 2'-O-methyluridine-3'-phosphate
  modified_base 5: mod_base = OTHER; note = 2'-O-methylguanosine-3'-phosphate
  modified_base 6: mod_base = OTHER; note = 2'-O-hexadecyl-guanosine-3'-phosphate
  modified_base 7: mod_base = OTHER; note = 2'-O-methyladenosine-3'-phosphate
  modified_base 8: mod_base = OTHER; note = 2'-O-methyluridine-3'-phosphate
  modified_base 9: mod_base = OTHER; note = 2'-deoxy-2'-fluorocytidine-3'-phosphate
  modified_base 10: mod_base = OTHER; note = 2'-deoxy-2'-fluorouridine-3'-phosphate
  modified_base 11: mod_base = OTHER; note = 2'-deoxy-2'-fluorouridine-3'-phosphate
  modified_base 12: mod_base = OTHER; note = 2'-O-methyladenosine-3'-phosphate
  modified_base 13: mod_base = OTHER; note = 2'-O-methylguanosine-3'-phosphate
  modified_base 14: mod_base = OTHER; note = 2'-O-methylcytidine-3'-phosphate
  modified_base 15: mod_base = OTHER; note = 2'-O-methyladenosine-3'-phosphate
  modified_base 16: mod_base = OTHER; note = 2'-O-methyladenosine-3'-phosphate
  modified_base 17: mod_base = OTHER; note = 2'-O-methylcytidine-3'-phosphate
  modified_base 18: mod_base = OTHER; note = 2'-O-methylguanosine-3'-phosphate
  modified_base 19: mod_base = OTHER; note = 2'-O-methyluridine-3'-phosphorothioate
  modified_base 20: mod_base = OTHER; note = 2'-O-methylcytidine-3'-phosphorothioate
  modified_base 21: mod_base = OTHER; note = 2'-O-methyladenosine
agctggatcttagcaacgtca

SEQ ID NO: 579 - RNA, 21 nt, synthetic construct
  source 1..21: mol_type = other RNA
  modified_base 1: mod_base = OTHER; note = 2'-O-methylguanosine-3'-phosphorothioate
  modified_base 2: mod_base = OTHER; note = 2'-O-methylcytidine-3'-phosphorothioate
  modified_base 3: mod_base = OTHER; note = 2'-O-methyluridine-3'-phosphate
  modified_base 4: mod_base = OTHER; note = 2'-O-methylguanosine-3'-phosphate
  modified_base 5: mod_base = OTHER; note = 2'-O-methylguanosine-3'-phosphate
  modified_base 6: mod_base = OTHER; note = 2'-O-hexadecyl-adenosine-3'-phosphate
  modified_base 7: mod_base = OTHER; note = 2'-O-methyluridine-3'-phosphate
  modified_base 8: mod_base = OTHER; note = 2'-O-methylcytidine-3'-phosphate
  modified_base 9: mod_base = OTHER; note = 2'-deoxy-2'-fluorouridine-3'-phosphate
  modified_base 10: mod_base = OTHER; note = 2'-deoxy-2'-fluorouridine-3'-phosphate
  modified_base 11: mod_base = OTHER; note = 2'-deoxy-2'-fluoroadenosine-3'-phosphate
  modified_base 12: mod_base = OTHER; note = 2'-O-methylguanosine-3'-phosphate
  modified_base 13: mod_base = OTHER; note = 2'-O-methylcytidine-3'-phosphate
  modified_base 14: mod_base = OTHER; note = 2'-O-methyladenosine-3'-phosphate
  modified_base 15: mod_base = OTHER; note = 2'-O-methyladenosine-3'-phosphate
  modified_base 16: mod_base = OTHER; note = 2'-O-methylcytidine-3'-phosphate
  modified_base 17: mod_base = OTHER; note = 2'-O-methylguanosine-3'-phosphate
  modified_base 18: mod_base = OTHER; note = 2'-O-methyluridine-3'-phosphate
  modified_base 19: mod_base = OTHER; note = 2'-O-methylcytidine-3'-phosphorothioate
  modified_base 20: mod_base = OTHER; note = 2'-O-methylcytidine-3'-phosphorothioate
  modified_base 21: mod_base = OTHER; note = 2'-O-methyladenosine
gctggatcttagcaacgtcca

SEQ ID NO: 580 - RNA, 21 nt, synthetic construct
  source 1..21: mol_type = other RNA
  modified_base 1: mod_base = OTHER; note = 2'-O-methyluridine-3'-phosphorothioate
  modified_base 2: mod_base = OTHER; note = 2'-O-methylguanosine-3'-phosphorothioate
  modified_base 3: mod_base = OTHER; note = 2'-O-methylguanosine-3'-phosphate
  modified_base 4: mod_base = OTHER; note = 2'-O-methyladenosine-3'-phosphate
  modified_base 5: mod_base = OTHER; note = 2'-O-methyluridine-3'-phosphate
  modified_base 6: mod_base = OTHER; note = 2'-O-hexadecyl-cytidine-3'-phosphate
  modified_base 7: mod_base = OTHER; note = 2'-O-methyluridine-3'-phosphate
  modified_base 8: mod_base = OTHER; note = 2'-O-methyluridine-3'-phosphate
  modified_base 9: mod_base = OTHER; note = 2'-deoxy-2'-fluoroadenosine-3'-phosphate
  modified_base 10: mod_base = OTHER; note = 2'-deoxy-2'-fluoroguanosine-3'-phosphate
  modified_base 11: mod_base = OTHER; note = 2'-deoxy-2'-fluorocytidine-3'-phosphate
  modified_base 12: mod_base = OTHER; note = 2'-O-methyladenosine-3'-phosphate
  modified_base 13: mod_base = OTHER; note = 2'-O-methyladenosine-3'-phosphate
  modified_base 14: mod_base = OTHER; note = 2'-O-methylcytidine-3'-phosphate
  modified_base 15: mod_base = OTHER; note = 2'-O-methylguanosine-3'-phosphate
  modified_base 16: mod_base = OTHER; note = 2'-O-methyluridine-3'-phosphate
  modified_base 17: mod_base = OTHER; note = 2'-O-methylcytidine-3'-phosphate
  modified_base 18: mod_base = OTHER; note = 2'-O-methylcytidine-3'-phosphate
  modified_base 19: mod_base = OTHER; note = 2'-O-methyladenosine-3'-phosphorothioate
  modified_base 20: mod_base = OTHER; note = 2'-O-methylguanosine-3'-phosphorothioate
  modified_base 21: mod_base = OTHER; note = 2'-O-methyladenosine
tggatcttagcaacgtccaga

SEQ ID NO: 581 - RNA, 21 nt, synthetic construct
  source 1..21: mol_type = other RNA
  modified_base 1: mod_base = OTHER; note = 2'-O-methylguanosine-3'-phosphorothioate
  modified_base 2: mod_base = OTHER; note = 2'-O-methylcytidine-3'-phosphorothioate
  modified_base 3: mod_base = OTHER; note = 2'-O-methyladenosine-3'-phosphate
  modified_base 4: mod_base = OTHER; note = 2'-O-methyladenosine-3'-phosphate
  modified_base 5: mod_base = OTHER; note = 2'-O-methylcytidine-3'-phosphate
  modified_base 6: mod_base = OTHER; note = 2'-O-hexadecyl-guanosine-3'-phosphate
  modified_base 7: mod_base = OTHER; note = 2'-O-methyluridine-3'-phosphate
  modified_base 8: mod_base = OTHER; note = 2'-O-methylcytidine-3'-phosphate
  modified_base 9: mod_base = OTHER; note = 2'-deoxy-2'-fluorocytidine-3'-phosphate
  modified_base 10: mod_base = OTHER; note = 2'-deoxy-2'-fluoroadenosine-3'-phosphate
  modified_base 11: mod_base = OTHER; note = 2'-deoxy-2'-fluoroguanosine-3'-phosphate
  modified_base 12: mod_base = OTHER; note = 2'-O-methyluridine-3'-phosphate
  modified_base 13: mod_base = OTHER; note = 2'-O-methylcytidine-3'-phosphate
  modified_base 14: mod_base = OTHER; note = 2'-O-methylcytidine-3'-phosphate
  modified_base 15: mod_base = OTHER; note = 2'-O-methyladenosine-3'-phosphate
  modified_base 16: mod_base = OTHER; note = 2'-O-methyladenosine-3'-phosphate
  modified_base 17: mod_base = OTHER; note = 2'-O-methylguanosine-3'-phosphate
  modified_base 18: mod_base = OTHER; note = 2'-O-methyluridine-3'-phosphate
  modified_base 19: mod_base = OTHER; note = 2'-O-methylguanosine-3'-phosphorothioate
  modified_base 20: mod_base = OTHER; note = 2'-O-methyluridine-3'-phosphorothioate
  modified_base 21: mod_base = OTHER; note = 2'-O-methyladenosine
gcaacgtccagtccaagtgta

SEQ ID NO: 582 - RNA, 21 nt, synthetic construct
  source 1..21: mol_type = other RNA
  modified_base 1: mod_base = OTHER; note = 2'-O-methylcytidine-3'-phosphorothioate
  modified_base 2: mod_base = OTHER; note = 2'-O-methyladenosine-3'-phosphorothioate
  modified_base 3: mod_base = OTHER; note = 2'-O-methyladenosine-3'-phosphate
  modified_base 4: mod_base = OTHER; note = 2'-O-methylcytidine-3'-phosphate
  modified_base 5: mod_base = OTHER; note = 2'-O-methylguanosine-3'-phosphate
  modified_base 6: mod_base = OTHER; note = 2'-O-hexadecyl-uridine-3'-phosphate
  modified_base 7: mod_base = OTHER; note = 2'-O-methylcytidine-3'-phosphate
  modified_base 8: mod_base = OTHER; note = 2'-O-methylcytidine-3'-phosphate
  modified_base 9: mod_base = OTHER; note = 2'-deoxy-2'-fluoroadenosine-3'-phosphate
  modified_base 10: mod_base = OTHER; note = 2'-deoxy-2'-fluoroguanosine-3'-phosphate
  modified_base 11: mod_base = OTHER; note = 2'-deoxy-2'-fluorouridine-3'-phosphate
  modified_base 12: mod_base = OTHER; note = 2'-O-methylcytidine-3'-phosphate
  modified_base 13: mod_base = OTHER; note = 2'-O-methylcytidine-3'-phosphate
  modified_base 14: mod_base = OTHER; note = 2'-O-methyladenosine-3'-phosphate
  modified_base 15: mod_base = OTHER; note = 2'-O-methyladenosine-3'-phosphate
  modified_base 16: mod_base = OTHER; note = 2'-O-methylguanosine-3'-phosphate
  modified_base 17: mod_base = OTHER; note = 2'-O-methyluridine-3'-phosphate
  modified_base 18: mod_base = OTHER; note = 2'-O-methylguanosine-3'-phosphate
  modified_base 19: mod_base = OTHER; note = 2'-O-methyluridine-3'-phosphorothioate
  modified_base 20: mod_base = OTHER; note = 2'-O-methylguanosine-3'-phosphorothioate
  modified_base 21: mod_base = OTHER; note = 2'-O-methyladenosine
caacgtccagtccaagtgtga

SEQ ID NO: 583 - RNA, 21 nt, synthetic construct
  source 1..21: mol_type = other RNA
  modified_base 1: mod_base = OTHER; note = 2'-O-methyladenosine-3'-phosphorothioate
  modified_base 2: mod_base = OTHER; note = 2'-O-methyladenosine-3'-phosphorothioate
  modified_base 3: mod_base = OTHER; note = 2'-O-methylcytidine-3'-phosphate
  modified_base 4: mod_base = OTHER; note = 2'-O-methylguanosine-3'-phosphate
  modified_base 5: mod_base = OTHER; note = 2'-O-methyluridine-3'-phosphate
  modified_base 6: mod_base = OTHER; note = 2'-O-hexadecyl-cytidine-3'-phosphate
  modified_base 7: mod_base = OTHER; note = 2'-O-methylcytidine-3'-phosphate
  modified_base 8: mod_base = OTHER; note = 2'-O-methyladenosine-3'-phosphate
  modified_base 9: mod_base = OTHER; note = 2'-deoxy-2'-fluoroguanosine-3'-phosphate
  modified_base 10: mod_base = OTHER; note = 2'-deoxy-2'-fluorouridine-3'-phosphate
  modified_base 11: mod_base = OTHER; note = 2'-deoxy-2'-fluorocytidine-3'-phosphate
  modified_base 12: mod_base = OTHER; note = 2'-O-methylcytidine-3'-phosphate
  modified_base 13: mod_base = OTHER; note = 2'-O-methyladenosine-3'-phosphate
  modified_base 14: mod_base = OTHER; note = 2'-O-methyladenosine-3'-phosphate
  modified_base 15: mod_base = OTHER; note = 2'-O-methylguanosine-3'-phosphate
  modified_base 16: mod_base = OTHER; note = 2'-O-methyluridine-3'-phosphate
  modified_base 17: mod_base = OTHER; note = 2'-O-methylguanosine-3'-phosphate
  modified_base 18: mod_base = OTHER; note = 2'-O-methyluridine-3'-phosphate
  modified_base 19: mod_base = OTHER; note = 2'-O-methylguanosine-3'-phosphorothioate
  modified_base 20: mod_base = OTHER; note = 2'-O-methylguanosine-3'-phosphorothioate
  modified_base 21: mod_base = OTHER; note = 2'-O-methyladenosine
aacgtccagtccaagtgtgga

SEQ ID NO: 584 - RNA, 21 nt, synthetic construct
  source 1..21: mol_type = other RNA
  modified_base 1: mod_base = OTHER; note = 2'-O-methylguanosine-3'-phosphorothioate
  modified_base 2: mod_base = OTHER; note = 2'-O-methyluridine-3'-phosphorothioate
  modified_base 3: mod_base = OTHER; note = 2'-O-methylcytidine-3'-phosphate
  modified_base 4: mod_base = OTHER; note = 2'-O-methylcytidine-3'-phosphate
  modified_base 5: mod_base = OTHER; note = 2'-O-methyladenosine-3'-phosphate
  modified_base 6: mod_base = OTHER; note = 2'-O-hexadecyl-adenosine-3'-phosphate
  modified_base 7: mod_base = OTHER; note = 2'-O-methylguanosine-3'-phosphate
  modified_base 8: mod_base = OTHER; note = 2'-O-methyluridine-3'-phosphate
  modified_base 9: mod_base = OTHER; note = 2'-deoxy-2'-fluoroguanosine-3'-phosphate
  modified_base 10: mod_base = OTHER; note = 2'-deoxy-2'-fluorouridine-3'-phosphate
  modified_base 11: mod_base = OTHER; note = 2'-deoxy-2'-fluoroguanosine-3'-phosphate
  modified_base 12: mod_base = OTHER; note = 2'-O-methylguanosine-3'-phosphate
  modified_base 13: mod_base = OTHER; note = 2'-O-methylcytidine-3'-phosphate
  modified_base 14: mod_base = OTHER; note = 2'-O-methyluridine-3'-phosphate
  modified_base 15: mod_base = OTHER; note = 2'-O-methylcytidine-3'-phosphate
  modified_base 16: mod_base = OTHER; note = 2'-O-methyladenosine-3'-phosphate
  modified_base 17: mod_base = OTHER; note = 2'-O-methyladenosine-3'-phosphate
  modified_base 18: mod_base = OTHER; note = 2'-O-methyladenosine-3'-phosphate
  modified_base 19: mod_base = OTHER; note = 2'-O-methylguanosine-3'-phosphorothioate
  modified_base 20: mod_base = OTHER; note = 2'-O-methylguanosine-3'-phosphorothioate
  modified_base 21: mod_base = OTHER; note = 2'-O-methyladenosine
gtccaagtgtggctcaaagga

SEQ ID NO: 585 - RNA, 21 nt, synthetic construct
  source 1..21: mol_type = other RNA
  modified_base 1: mod_base = OTHER; note = 2'-O-methyluridine-3'-phosphorothioate
  modified_base 2: mod_base = OTHER; note = 2'-O-methylcytidine-3'-phosphorothioate
  modified_base 3: mod_base = OTHER; note = 2'-O-methylcytidine-3'-phosphate
  modified_base 4: mod_base = OTHER; note = 2'-O-methyladenosine-3'-phosphate
  modified_base 5: mod_base = OTHER; note = 2'-O-methyladenosine-3'-phosphate
  modified_base 6: mod_base = OTHER; note = 2'-O-hexadecyl-guanosine-3'-phosphate
  modified_base 7: mod_base = OTHER; note = 2'-O-methyluridine-3'-phosphate
  modified_base 8: mod_base = OTHER; note = 2'-O-methylguanosine-3'-phosphate
  modified_base 9: mod_base = OTHER; note = 2'-deoxy-2'-fluorouridine-3'-phosphate
  modified_base 10: mod_base = OTHER; note = 2'-deoxy-2'-fluoroguanosine-3'-phosphate
  modified_base 11: mod_base = OTHER; note = 2'-deoxy-2'-fluoroguanosine-3'-phosphate
  modified_base 12: mod_base = OTHER; note = 2'-O-methylcytidine-3'-phosphate
  modified_base 13: mod_base = OTHER; note = 2'-O-methyluridine-3'-phosphate
  modified_base 14: mod_base = OTHER; note = 2'-O-methylcytidine-3'-phosphate
  modified_base 15: mod_base = OTHER; note = 2'-O-methyladenosine-3'-phosphate
  modified_base 16: mod_base = OTHER; note = 2'-O-methyladenosine-3'-phosphate
  modified_base 17: mod_base = OTHER; note = 2'-O-methyladenosine-3'-phosphate
  modified_base 18: mod_base = OTHER; note = 2'-O-methylguanosine-3'-phosphate
  modified_base 19: mod_base = OTHER; note = 2'-O-methylguanosine-3'-phosphorothioate
  modified_base 20: mod_base = OTHER; note = 2'-O-methyladenosine-3'-phosphorothioate
  modified_base 21: mod_base = OTHER; note = 2'-O-methyladenosine
tccaagtgtggctcaaaggaa

SEQ ID NO: 586 - RNA, 21 nt, synthetic construct
  source 1..21: mol_type = other RNA
  modified_base 1: mod_base = OTHER; note = 2'-O-methylcytidine-3'-phosphorothioate
  modified_base 2: mod_base = OTHER; note = 2'-O-methylcytidine-3'-phosphorothioate
  modified_base 3: mod_base = OTHER; note = 2'-O-methyladenosine-3'-phosphate
  modified_base 4: mod_base = OTHER; note = 2'-O-methyladenosine-3'-phosphate
  modified_base 5: mod_base = OTHER; note = 2'-O-methylguanosine-3'-phosphate
  modified_base 6: mod_base = OTHER; note = 2'-O-hexadecyl-uridine-3'-phosphate
  modified_base 7: mod_base = OTHER; note = 2'-O-methylguanosine-3'-phosphate
  modified_base 8: mod_base = OTHER; note = 2'-O-methyluridine-3'-phosphate
  modified_base 9: mod_base = OTHER; note = 2'-deoxy-2'-fluoroguanosine-3'-phosphate
  modified_base 10: mod_base = OTHER; note = 2'-deoxy-2'-fluoroguanosine-3'-phosphate
  modified_base 11: mod_base = OTHER; note = 2'-deoxy-2'-fluorocytidine-3'-phosphate
  modified_base 12: mod_base = OTHER; note = 2'-O-methyluridine-3'-phosphate
  modified_base 13: mod_base = OTHER; note = 2'-O-methylcytidine-3'-phosphate
  modified_base 14: mod_base = OTHER; note = 2'-O-methyladenosine-3'-phosphate
  modified_base 15: mod_base = OTHER; note = 2'-O-methyladenosine-3'-phosphate
  modified_base 16: mod_base = OTHER; note = 2'-O-methyladenosine-3'-phosphate
  modified_base 17: mod_base = OTHER; note = 2'-O-methylguanosine-3'-phosphate
  modified_base 18: mod_base = OTHER; note = 2'-O-methylguanosine-3'-phosphate
  modified_base 19: mod_base = OTHER; note = 2'-O-methyladenosine-3'-phosphorothioate
  modified_base 20: mod_base = OTHER; note = 2'-O-methyluridine-3'-phosphorothioate
  modified_base 21: mod_base = OTHER; note = 2'-O-methyladenosine
ccaagtgtggctcaaaggata

SEQ ID NO: 587 - RNA, 21 nt, synthetic construct
  source 1..21: mol_type = other RNA
  modified_base 1: mod_base = OTHER; note = 2'-O-methylguanosine-3'-phosphorothioate
  modified_base 2: mod_base = OTHER; note = 2'-O-methyluridine-3'-phosphorothioate
  modified_base 3: mod_base = OTHER; note = 2'-O-methylguanosine-3'-phosphate
  modified_base 4: mod_base = OTHER; note = 2'-O-methylguanosine-3'-phosphate
  modified_base 5: mod_base = OTHER; note = 2'-O-methylcytidine-3'-phosphate
  modified_base 6: mod_base = OTHER; note = 2'-O-hexadecyl-uridine-3'-phosphate
  modified_base 7: mod_base = OTHER; note = 2'-O-methylcytidine-3'-phosphate
  modified_base 8: mod_base = OTHER; note = 2'-O-methyladenosine-3'-phosphate
  modified_base 9: mod_base = OTHER; note = 2'-deoxy-2'-fluoroadenosine-3'-phosphate
  modified_base 10: mod_base = OTHER; note = 2'-deoxy-2'-fluoroadenosine-3'-phosphate
  modified_base 11: mod_base = OTHER; note = 2'-deoxy-2'-fluoroguanosine-3'-phosphate
  modified_base 12: mod_base = OTHER; note = 2'-O-methylguanosine-3'-phosphate
  modified_base 13: mod_base = OTHER; note = 2'-O-methyladenosine-3'-phosphate
  modified_base 14: mod_base = OTHER; note = 2'-O-methyluridine-3'-phosphate
  modified_base 15: mod_base = OTHER; note = 2'-O-methyladenosine-3'-phosphate
  modified_base 16: mod_base = OTHER; note = 2'-O-methyladenosine-3'-phosphate
  modified_base 17: mod_base = OTHER; note = 2'-O-methyluridine-3'-phosphate
  modified_base 18: mod_base = OTHER; note = 2'-O-methyladenosine-3'-phosphate
  modified_base 19: mod_base = OTHER; note = 2'-O-methyluridine-3'-phosphorothioate
  modified_base 20: mod_base = OTHER; note = 2'-O-methylcytidine-3'-phosphorothioate
  modified_base 21: mod_base = OTHER; note = 2'-O-methyladenosine
gtggctcaaaggataatatca

SEQ ID NO: 588 - RNA, 21 nt, synthetic construct
  source 1..21: mol_type = other RNA
  modified_base 1: mod_base = OTHER; note = 2'-O-methylguanosine-3'-phosphorothioate
  modified_base 2: mod_base = OTHER; note = 2'-O-methylguanosine-3'-phosphorothioate
  modified_base 3: mod_base = OTHER; note = 2'-O-methylcytidine-3'-phosphate
  modified_base 4: mod_base = OTHER; note = 2'-O-methyluridine-3'-phosphate
  modified_base 5: mod_base = OTHER; note = 2'-O-methylcytidine-3'-phosphate
  modified_base 6: mod_base = OTHER; note = 2'-O-hexadecyl-adenosine-3'-phosphate
  modified_base 7: mod_base = OTHER; note = 2'-O-methyladenosine-3'-phosphate
  modified_base 8: mod_base = OTHER; note = 2'-O-methyladenosine-3'-phosphate
  modified_base 9: mod_base = OTHER; note = 2'-deoxy-2'-fluoroguanosine-3'-phosphate
  modified_base 10: mod_base = OTHER; note = 2'-deoxy-2'-fluoroguanosine-3'-phosphate
  modified_base 11: mod_base = OTHER; note = 2'-deoxy-2'-fluoroadenosine-3'-phosphate
  modified_base 12: mod_base = OTHER; note = 2'-O-methyluridine-3'-phosphate
  modified_base 13: mod_base = OTHER; note = 2'-O-methyladenosine-3'-phosphate
  modified_base 14: mod_base = OTHER; note = 2'-O-methyladenosine-3'-phosphate
  modified_base 15: mod_base = OTHER; note = 2'-O-methyluridine-3'-phosphate
  modified_base 16: mod_base = OTHER; note = 2'-O-methyladenosine-3'-phosphate
  modified_base 17: mod_base = OTHER; note = 2'-O-methyluridine-3'-phosphate
  modified_base 18: mod_base = OTHER; note = 2'-O-methylcytidine-3'-phosphate
  modified_base 19: mod_base = OTHER; note = 2'-O-methyladenosine-3'-phosphorothioate
  modified_base 20: mod_base = OTHER; note = 2'-O-methyladenosine-3'-phosphorothioate
  modified_base 21: mod_base = OTHER; note = 2'-O-methyladenosine
ggctcaaaggataatatcaaa

SEQ ID NO: 589 - RNA, 21 nt, synthetic construct
  source 1..21: mol_type = other RNA
  modified_base 1: mod_base = OTHER; note = 2'-O-methylguanosine-3'-phosphorothioate
  modified_base 2: mod_base = OTHER; note = 2'-O-methylguanosine-3'-phosphorothioate
  modified_base 3: mod_base = OTHER; note = 2'-O-methyladenosine-3'-phosphate
  modified_base 4: mod_base = OTHER; note = 2'-O-methyluridine-3'-phosphate
  modified_base 5: mod_base = OTHER; note = 2'-O-methyladenosine-3'-phosphate
  modified_base 6: mod_base = OTHER; note = 2'-O-hexadecyl-adenosine-3'-phosphate
  modified_base 7: mod_base = OTHER; note = 2'-O-methyluridine-3'-phosphate
  modified_base 8: mod_base = OTHER; note = 2'-O-methyladenosine-3'-phosphate
  modified_base 9: mod_base = OTHER; note = 2'-deoxy-2'-fluorouridine-3'-phosphate
  modified_base 10: mod_base = OTHER; note = 2'-deoxy-2'-fluorocytidine-3'-phosphate
  modified_base 11: mod_base = OTHER; note = 2'-deoxy-2'-fluoroadenosine-3'-phosphate
  modified_base 12: mod_base = OTHER; note = 2'-O-methyladenosine-3'-phosphate
  modified_base 13: mod_base = OTHER; note = 2'-O-methyladenosine-3'-phosphate
  modified_base 14: mod_base = OTHER; note = 2'-O-methylcytidine-3'-phosphate
  modified_base 15: mod_base = OTHER; note = 2'-O-methyladenosine-3'-phosphate
  modified_base 16: mod_base = OTHER; note = 2'-O-methylcytidine-3'-phosphate
  modified_base 17: mod_base = OTHER; note = 2'-O-methylguanosine-3'-phosphate
  modified_base 18: mod_base = OTHER; note = 2'-O-methyluridine-3'-phosphate
  modified_base 19: mod_base = OTHER; note = 2'-O-methylcytidine-3'-phosphorothioate
  modified_base 20: mod_base = OTHER; note = 2'-O-methylcytidine-3'-phosphorothioate
  modified_base 21: mod_base = OTHER; note = 2'-O-methyladenosine
ggataatatcaaacacgtcca

SEQ ID NO: 590 - RNA, 21 nt, synthetic construct
  source 1..21: mol_type = other RNA
  modified_base 1: mod_base = OTHER; note = 2'-O-methyladenosine-3'-phosphorothioate
  modified_base 2: mod_base = OTHER; note = 2'-O-methyluridine-3'-phosphorothioate
  modified_base 3: mod_base = OTHER; note = 2'-O-methyladenosine-3'-phosphate
  modified_base 4: mod_base = OTHER; note = 2'-O-methyladenosine-3'-phosphate
  modified_base 5: mod_base = OTHER; note = 2'-O-methyluridine-3'-phosphate
  modified_base 6: mod_base = OTHER; note = 2'-O-hexadecyl-adenosine-3'-phosphate
  modified_base 7: mod_base = OTHER; note = 2'-O-methyluridine-3'-phosphate
  modified_base 8: mod_base = OTHER; note = 2'-O-methylcytidine-3'-phosphate
  modified_base 9: mod_base = OTHER; note = 2'-deoxy-2'-fluoroadenosine-3'-phosphate
  modified_base 10: mod_base = OTHER; note = 2'-deoxy-2'-fluoroadenosine-3'-phosphate
  modified_base 11: mod_base = OTHER; note = 2'-deoxy-2'-fluoroadenosine-3'-phosphate
  modified_base 12: mod_base = OTHER; note = 2'-O-methylcytidine-3'-phosphate
  modified_base 13: mod_base = OTHER; note = 2'-O-methyladenosine-3'-phosphate
  modified_base 14: mod_base = OTHER; note = 2'-O-methylcytidine-3'-phosphate
  modified_base 15: mod_base = OTHER; note = 2'-O-methylguanosine-3'-phosphate
  modified_base 16: mod_base = OTHER; note = 2'-O-methyluridine-3'-phosphate
  modified_base 17: mod_base = OTHER; note = 2'-O-methylcytidine-3'-phosphate
  modified_base 18: mod_base = OTHER; note = 2'-O-methylcytidine-3'-phosphate
  modified_base 19: mod_base = OTHER; note = 2'-O-methylcytidine-3'-phosphorothioate
  modified_base 20: mod_base = OTHER; note = 2'-O-methylguanosine-3'-phosphorothioate
  modified_base 21: mod_base = OTHER; note = 2'-O-methyladenosine
ataatatcaaacacgtcccga

SEQ ID NO: 591 - RNA, 21 nt, synthetic construct
  source 1..21: mol_type = other RNA
  modified_base 1: mod_base = OTHER; note = 2'-O-methyladenosine-3'-phosphorothioate
  modified_base 2: mod_base = OTHER; note = 2'-O-methyladenosine-3'-phosphorothioate
  modified_base 3: mod_base = OTHER; note = 2'-O-methyluridine-3'-phosphate
  modified_base 4: mod_base = OTHER; note = 2'-O-methyladenosine-3'-phosphate
  modified_base 5: mod_base = OTHER; note = 2'-O-methyluridine-3'-phosphate
  modified_base 6: mod_base = OTHER; note = 2'-O-hexadecyl-cytidine-3'-phosphate
  modified_base 7: mod_base = OTHER; note = 2'-O-methyladenosine-3'-phosphate
  modified_base 8: mod_base = OTHER; note = 2'-O-methyladenosine-3'-phosphate
  modified_base 9: mod_base = OTHER; note = 2'-deoxy-2'-fluoroadenosine-3'-phosphate
  modified_base 10: mod_base = OTHER; note = 2'-deoxy-2'-fluorocytidine-3'-phosphate
  modified_base 11: mod_base = OTHER; note = 2'-deoxy-2'-fluoroadenosine-3'-phosphate
  modified_base 12: mod_base = OTHER; note = 2'-O-methylcytidine-3'-phosphate
  modified_base 13: mod_base = OTHER; note = 2'-O-methylguanosine-3'-phosphate
  modified_base 14: mod_base = OTHER; note = 2'-O-methyluridine-3'-phosphate
  modified_base 15: mod_base = OTHER; note = 2'-O-methylcytidine-3'-phosphate
  modified_base 16: mod_base = OTHER; note = 2'-O-methylcytidine-3'-phosphate
  modified_base 17: mod_base = OTHER; note = 2'-O-methylcytidine-3'-phosphate
  modified_base 18: mod_base = OTHER; note = 2'-O-methylguanosine-3'-phosphate
  modified_base 19: mod_base = OTHER; note = 2'-O-methylguanosine-3'-phosphorothioate
  modified_base 20: mod_base = OTHER; note = 2'-O-methylguanosine-3'-phosphorothioate
  modified_base 21: mod_base = OTHER; note = 2'-O-methyladenosine
aatatcaaacacgtcccggga

SEQ ID NO: 592 - RNA, 21 nt, synthetic construct
  source 1..21: mol_type = other RNA
  modified_base 1: mod_base = OTHER; note = 2'-O-methyluridine-3'-phosphorothioate
  modified_base 2: mod_base = OTHER; note = 2'-O-methyladenosine-3'-phosphorothioate
  modified_base 3: mod_base = OTHER; note = 2'-O-methyluridine-3'-phosphate
  modified_base 4: mod_base = OTHER; note = 2'-O-methylcytidine-3'-phosphate
  modified_base 5: mod_base = OTHER; note = 2'-O-methyladenosine-3'-phosphate
  modified_base 6: mod_base = OTHER; note = 2'-O-hexadecyl-adenosine-3'-phosphate
  modified_base 7: mod_base = OTHER; note = 2'-O-methyladenosine-3'-phosphate
  modified_base 8: mod_base = OTHER; note = 2'-O-methylcytidine-3'-phosphate
  modified_base 9: mod_base = OTHER; note = 2'-deoxy-2'-fluoroadenosine-3'-phosphate
  modified_base 10: mod_base = OTHER; note = 2'-deoxy-2'-fluorocytidine-3'-phosphate
  modified_base 11: mod_base = OTHER; note = 2'-deoxy-2'-fluoroguanosine-3'-phosphate
  modified_base 12: mod_base = OTHER; note = 2'-O-methyluridine-3'-phosphate
  modified_base 13: mod_base = OTHER; note = 2'-O-methylcytidine-3'-phosphate
  modified_base 14: mod_base = OTHER; note = 2'-O-methylcytidine-3'-phosphate
  modified_base 15: mod_base = OTHER; note = 2'-O-methylcytidine-3'-phosphate
  modified_base 16: mod_base = OTHER; note = 2'-O-methylguanosine-3'-phosphate
  modified_base 17: mod_base = OTHER; note = 2'-O-methylguanosine-3'-phosphate
  modified_base 18: mod_base = OTHER; note = 2'-O-methylguanosine-3'-phosphate
  modified_base 19: mod_base = OTHER; note = 2'-O-methyladenosine-3'-phosphorothioate
  modified_base 20: mod_base = OTHER; note = 2'-O-methylguanosine-3'-phosphorothioate
  modified_base 21: mod_base = OTHER; note = 2'-O-methyladenosine
tatcaaacacgtcccgggaga

SEQ ID NO: 593 - RNA, 21 nt, synthetic construct
  source 1..21: mol_type = other RNA
  modified_base 1: mod_base = OTHER; note = 2'-O-methyladenosine-3'-phosphorothioate
  modified_base 2: mod_base = OTHER; note = 2'-O-methyluridine-3'-phosphorothioate
  modified_base 3: mod_base = OTHER; note = 2'-O-methylcytidine-3'-phosphate
  modified_base 4: mod_base = OTHER; note = 2'-O-methyladenosine-3'-phosphate
  modified_base 5: mod_base = OTHER; note = 2'-O-methyladenosine-3'-phosphate
  modified_base 6: mod_base = OTHER; note = 2'-O-hexadecyl-adenosine-3'-phosphate
  modified_base 7: mod_base = OTHER; note = 2'-O-methylcytidine-3'-phosphate
  modified_base 8: mod_base = OTHER; note = 2'-O-methyladenosine-3'-phosphate
  modified_base 9: mod_base = OTHER; note = 2'-deoxy-2'-fluorocytidine-3'-phosphate
  modified_base 10: mod_base = OTHER; note = 2'-deoxy-2'-fluoroguanosine-3'-phosphate
  modified_base 11: mod_base = OTHER; note = 2'-deoxy-2'-fluorouridine-3'-phosphate
  modified_base 12: mod_base = OTHER; note = 2'-O-methylcytidine-3'-phosphate
  modified_base 13: mod_base = OTHER; note = 2'-O-methylcytidine-3'-phosphate
  modified_base 14: mod_base = OTHER; note = 2'-O-methylcytidine-3'-phosphate
  modified_base 15: mod_base = OTHER; note = 2'-O-methylguanosine-3'-phosphate
  modified_base 16: mod_base = OTHER; note = 2'-O-methylguanosine-3'-phosphate
  modified_base 17: mod_base = OTHER; note = 2'-O-methylguanosine-3'-phosphate
  modified_base 18: mod_base = OTHER; note = 2'-O-methyladenosine-3'-phosphate
  modified_base 19: mod_base = OTHER; note = 2'-O-methylguanosine-3'-phosphorothioate
  modified_base 20: mod_base = OTHER; note = 2'-O-methylguanosine-3'-phosphorothioate
  modified_base 21: mod_base = OTHER; note = 2'-O-methyladenosine
atcaaacacgtcccgggagga

SEQ ID NO: 594 - RNA, 21 nt, synthetic construct
  source 1..21: mol_type = other RNA
  modified_base 1: mod_base = OTHER; note = 2'-O-methyluridine-3'-phosphorothioate
  modified_base 2: mod_base = OTHER; note = 2'-O-methylcytidine-3'-phosphorothioate
  modified_base 3: mod_base = OTHER; note = 2'-O-methyladenosine-3'-phosphate
  modified_base 4: mod_base = OTHER; note = 2'-O-methyladenosine-3'-phosphate
  modified_base 5: mod_base = OTHER; note = 2'-O-methyladenosine-3'-phosphate
  modified_base 6: mod_base = OTHER; note = 2'-O-hexadecyl-guanosine-3'-phosphate
  modified_base 7: mod_base = OTHER; note = 2'-O-methylguanosine-3'-phosphate
  modified_base 8: mod_base = OTHER; note = 2'-O-methyladenosine-3'-phosphate
  modified_base 9: mod_base = OTHER; note = 2'-deoxy-2'-fluorouridine-3'-phosphate
  modified_base 10: mod_base = OTHER; note = 2'-deoxy-2'-fluoroadenosine-3'-phosphate
  modified_base 11: mod_base = OTHER; note = 2'-deoxy-2'-fluoroadenosine-3'-phosphate
  modified_base 12: mod_base = OTHER; note = 2'-O-methyluridine-3'-phosphate
  modified_base 13: mod_base = OTHER; note = 2'-O-methyladenosine-3'-phosphate
  modified_base 14: mod_base = OTHER; note = 2'-O-methyluridine-3'-phosphate
  modified_base 15: mod_base = OTHER; note = 2'-O-methylcytidine-3'-phosphate
  modified_base 16: mod_base = OTHER; note = 2'-O-methyladenosine-3'-phosphate
  modified_base 17: mod_base = OTHER; note = 2'-O-methyladenosine-3'-phosphate
  modified_base 18: mod_base = OTHER; note = 2'-O-methyladenosine-3'-phosphate
  modified_base 19: mod_base = OTHER; note = 2'-O-methylcytidine-3'-phosphorothioate
  modified_base 20: mod_base = OTHER; note = 2'-O-methyladenosine-3'-phosphorothioate
  modified_base 21: mod_base = OTHER; note = 2'-O-methyladenosine
tcaaaggataatatcaaacaa

SEQ ID NO: 595 - RNA, 21 nt, synthetic construct
  source 1..21: mol_type = other RNA
  modified_base 1: mod_base = OTHER; note = 2'-O-methylcytidine-3'-phosphorothioate
  modified_base 2: mod_base = OTHER; note = 2'-O-methyladenosine-3'-phosphorothioate
  modified_base 3: mod_base = OTHER; note = 2'-O-methyladenosine-3'-phosphate
  modified_base 4: mod_base = OTHER; note = 2'-O-methyladenosine-3'-phosphate
  modified_base 5: mod_base = OTHER; note = 2'-O-methylguanosine-3'-phosphate
  modified_base 6: mod_base = OTHER; note = 2'-O-hexadecyl-guanosine-3'-phosphate
  modified_base 7: mod_base = OTHER; note = 2'-O-methyladenosine-3'-phosphate
  modified_base 8: mod_base = OTHER; note = 2'-O-methyluridine-3'-phosphate
  modified_base 9: mod_base = OTHER; note = 2'-deoxy-2'-fluoroadenosine-3'-phosphate
  modified_base 10: mod_base = OTHER; note = 2'-deoxy-2'-fluoroadenosine-3'-phosphate
  modified_base 11: mod_base = OTHER; note = 2'-deoxy-2'-fluorouridine-3'-phosphate
  modified_base 12: mod_base = OTHER; note = 2'-O-methyladenosine-3'-phosphate
  modified_base 13: mod_base = OTHER; note = 2'-O-methyluridine-3'-phosphate
  modified_base 14: mod_base = OTHER; note = 2'-O-methylcytidine-3'-phosphate
  modified_base 15: mod_base = OTHER; note = 2'-O-methyladenosine-3'-phosphate
  modified_base 16: mod_base = OTHER; note = 2'-O-methyladenosine-3'-phosphate
  modified_base 17: mod_base = OTHER; note = 2'-O-methyladenosine-3'-phosphate
  modified_base 18: mod_base = OTHER; note = 2'-O-methylcytidine-3'-phosphate
  modified_base 19: mod_base = OTHER; note = 2'-O-methyladenosine-3'-phosphorothioate
  modified_base 20: mod_base = OTHER; note = 2'-O-methylcytidine-3'-phosphorothioate
  modified_base 21: mod_base = OTHER; note = 2'-O-methyladenosine
caaaggataatatcaaacaca

SEQ ID NO: 596 - DNA, 23 bp, synthetic construct
  source 1..23: mol_type = other DNA
  modified_base 1: mod_base = OTHER; note = 2'-O-methyluridine-3'-phosphorothioate 5'-(E)-Vinylphosphonate
  modified_base 2: mod_base = OTHER; note = 2'-deoxycytidine-3'-phosphorothioate
  modified_base 3: mod_base = OTHER; note = 2'-O-methyladenosine-3'-phosphate
  modified_base 4: mod_base = OTHER; note = 2'-O-methylguanosine-3'-phosphate
  modified_base 6: mod_base = OTHER; note = 2'-O-methyluridine-3'-phosphate
  modified_base 8: mod_base = OTHER; note = 2'-O-methylcytidine-3'-phosphate
  modified_base 9: mod_base = OTHER; note = 2'-O-methyluridine-3'-phosphate
  modified_base 10: mod_base = OTHER; note = 2'-O-methyluridine-3'-phosphate
  modified_base 11: mod_base = OTHER; note = 2'-O-methyladenosine-3'-phosphate
  modified_base 13: mod_base = OTHER; note = 2'-O-methyluridine-3'-phosphate
  modified_base 14: mod_base = OTHER; note = 2'-deoxy-2'-fluoroadenosine-3'-phosphate
  modified_base 15: mod_base = OTHER; note = 2'-O-methyladenosine-3'-phosphate
  modified_base 16: mod_base = OTHER; note = 2'-O-methyluridine-3'-phosphate
  modified_base 17: mod_base = OTHER; note = 2'-O-methyluridine-3'-phosphate
  modified_base 18: mod_base = OTHER; note = 2'-O-methyladenosine-3'-phosphate
  modified_base 19: mod_base = OTHER; note = 2'-O-methyluridine-3'-phosphate
  modified_base 20: mod_base = OTHER; note = 2'-O-methylcytidine-3'-phosphate
  modified_base 21: mod_base = OTHER; note = 2'-O-methyluridine-3'-phosphorothioate
  modified_base 22: mod_base = OTHER; note = 2'-O-methylguanosine-3'-phosphorothioate
  modified_base 23: mod_base = OTHER; note = 2'-O-methylcytidine
  misc_feature 1: note = RNA
  misc_feature 3..4: note = RNA
  misc_feature 6: note = RNA
  misc_feature 8..11: note = RNA
  misc_feature 13..23: note = RNA
  misc_feature 2: note = DNA
  misc_feature 5: note = DNA
  misc_feature 7: note = DNA
  misc_feature 12: note = DNA
tcagcttcttattaattatctgc

SEQ ID NO: 597 - DNA, 23 bp, synthetic construct
  source 1..23: mol_type = other DNA
  modified_base 1: mod_base = OTHER; note = 2'-O-methyluridine-3'-phosphorothioate 5'-(E)-Vinylphosphonate
  modified_base 2: mod_base = OTHER; note = 2'-deoxyadenosine-3'-phosphorothioate
  modified_base 3: mod_base = OTHER; note = 2'-O-methyladenosine-3'-phosphate
  modified_base 4: mod_base = OTHER; note = 2'-O-methylguanosine-3'-phosphate
  modified_base 6: mod_base = OTHER; note = 2'-O-methyluridine-3'-phosphate
  modified_base 8: mod_base = OTHER; note = 2'-O-methylcytidine-3'-phosphate
  modified_base 9: mod_base = OTHER; note = 2'-O-methyladenosine-3'-phosphate
  modified_base 10: mod_base = OTHER; note = 2'-O-methylguanosine-3'-phosphate
  modified_base 11: mod_base = OTHER; note = 2'-O-methylcytidine-3'-phosphate
  modified_base 13: mod_base = OTHER; note = 2'-O-methyluridine-3'-phosphate
  modified_base 14: mod_base = OTHER; note = 2'-deoxy-2'-fluorocytidine-3'-phosphate
  modified_base 15: mod_base = OTHER; note = 2'-O-methyluridine-3'-phosphate
  modified_base 16: mod_base = OTHER; note = 2'-O-methyluridine-3'-phosphate
  modified_base 17: mod_base = OTHER; note = 2'-O-methyladenosine-3'-phosphate
  modified_base 18: mod_base = OTHER; note = 2'-O-methyluridine-3'-phosphate
  modified_base 19: mod_base = OTHER; note = 2'-O-methyluridine-3'-phosphate
  modified_base 20: mod_base = OTHER; note = 2'-O-methyladenosine-3'-phosphate
  modified_base 21: mod_base = OTHER; note = 2'-O-methyladenosine-3'-phosphorothioate
  modified_base 22: mod_base = OTHER; note = 2'-O-methyluridine-3'-phosphorothioate
  modified_base 23: mod_base = OTHER; note = 2'-O-methyluridine
  misc_feature 1: note = RNA
  misc_feature 3..4: note = RNA
  misc_feature 6: note = RNA
  misc_feature 8..11: note = RNA
  misc_feature 13..23: note = RNA
  misc_feature 2: note = DNA
  misc_feature 5: note = DNA
  misc_feature 7: note = DNA
  misc_feature 12: note = DNA
taagatccagcttcttattaatt

SEQ ID NO: 598 - DNA, 23 bp, synthetic construct
  source 1..23: mol_type = other DNA
  modified_base 1: mod_base = OTHER; note = 2'-O-methyluridine-3'-phosphorothioate 5'-(E)-Vinylphosphonate
  modified_base 2: mod_base = OTHER; note = 2'-deoxyguanosine-3'-phosphorothioate
  modified_base 3: mod_base = OTHER; note = 2'-O-methylcytidine-3'-phosphate
  modified_base 4: mod_base = OTHER; note = 2'-O-methyluridine-3'-phosphate
  modified_base 6: mod_base = OTHER; note = 2'-O-methyladenosine-3'-phosphate
  modified_base 8: mod_base = OTHER; note = 2'-O-methyladenosine-3'-phosphate
  modified_base 9: mod_base = OTHER; note = 2'-O-methyluridine-3'-phosphate
  modified_base 10: mod_base = OTHER; note = 2'-O-methylcytidine-3'-phosphate
  modified_base 11: mod_base = OTHER; note = 2'-O-methylcytidine-3'-phosphate
  modified_base 13: mod_base = OTHER; note = 2'-O-methylguanosine-3'-phosphate
  modified_base 14: mod_base = OTHER; note = 2'-deoxy-2'-fluorocytidine-3'-phosphate
  modified_base 15: mod_base = OTHER; note = 2'-O-methyluridine-3'-phosphate
  modified_base 16: mod_base = OTHER; note = 2'-O-methyluridine-3'-phosphate
  modified_base 17: mod_base = OTHER; note = 2'-O-methylcytidine-3'-phosphate
  modified_base 18: mod_base = OTHER; note = 2'-O-methyluridine-3'-phosphate
  modified_base 19: mod_base = OTHER; note = 2'-O-methyluridine-3'-phosphate
  modified_base 20: mod_base = OTHER; note = 2'-O-methyladenosine-3'-phosphate
  modified_base 21: mod_base = OTHER; note = 2'-O-methyluridine-3'-phosphorothioate
  modified_base 22: mod_base = OTHER; note = 2'-O-methyluridine-3'-phosphorothioate
  modified_base 23: mod_base = OTHER; note = 2'-O-methyladenosine
  misc_feature 1: note = RNA
  misc_feature 3..4: note = RNA
  misc_feature 6: note = RNA
  misc_feature 8..11: note = RNA
  misc_feature 13..23: note = RNA
  misc_feature 2: note = DNA
  misc_feature 5: note = DNA
  misc_feature 7: note = DNA
  misc_feature 12: note = DNA
tgctaagatccagcttcttatta

SEQ ID NO: 599 - DNA, 23 bp, synthetic construct
  source 1..23: mol_type = other DNA
  modified_base 1: mod_base = OTHER; note = 2'-O-methyluridine-3'-phosphorothioate 5'-(E)-Vinylphosphonate
  modified_base 2: mod_base = OTHER; note = 2'-deoxyguanosine-3'-phosphorothioate
  modified_base 3: mod_base = OTHER; note = 2'-O-methyladenosine-3'-phosphate
  modified_base 4: mod_base = OTHER; note = 2'-O-methylcytidine-3'-phosphate
  modified_base 6: mod_base = OTHER; note = 2'-O-methyluridine-3'-phosphate
  modified_base 8: mod_base = OTHER; note = 2'-O-methylguanosine-3'-phosphate
  modified_base 9: mod_base = OTHER; note = 2'-O-methylcytidine-3'-phosphate
  modified_base 10: mod_base = OTHER; note = 2'-O-methyluridine-3'-phosphate
  modified_base 11: mod_base = OTHER; note = 2'-O-methyladenosine-3'-phosphate
  modified_base 13: mod_base = OTHER; note = 2'-O-methylguanosine-3'-phosphate
  modified_base 14: mod_base = OTHER; note = 2'-deoxy-2'-fluoroadenosine-3'-phosphate
  modified_base 15: mod_base = OTHER; note = 2'-O-methyluridine-3'-phosphate
  modified_base 16: mod_base = OTHER; note = 2'-O-methylcytidine-3'-phosphate
  modified_base 17: mod_base = OTHER; note = 2'-O-methylcytidine-3'-phosphate
  modified_base 18: mod_base = OTHER; note = 2'-O-methyladenosine-3'-phosphate
  modified_base 19: mod_base = OTHER; note = 2'-O-methylguanosine-3'-phosphate
  modified_base 20: mod_base = OTHER; note = 2'-O-methylcytidine-3'-phosphate
  modified_base 21: mod_base = OTHER; note = 2'-O-methyluridine-3'-phosphorothioate
  modified_base 22: mod_base = OTHER; note = 2'-O-methyluridine-3'-phosphorothioate
  modified_base 23: mod_base = OTHER; note = 2'-O-methylcytidine
  misc_feature 1: note = RNA
  misc_feature 3..4: note = RNA
  misc_feature 6: note = RNA
  misc_feature 8..11: note = RNA
  misc_feature 13..23: note = RNA
  misc_feature 2: note = DNA
  misc_feature 5: note = DNA
  misc_feature 7: note = DNA
  misc_feature 12: note = DNA
tgacgttgctaagatccagcttc

SEQ ID NO: 600 - DNA, 23 bp, synthetic construct
  source 1..23: mol_type = other DNA
  modified_base 1: mod_base = OTHER; note = 2'-O-methyluridine-3'-phosphorothioate 5'-(E)-Vinylphosphonate
  modified_base 2: mod_base = OTHER; note = 2'-deoxyguanosine-3'-phosphorothioate
  modified_base 3: mod_base = OTHER; note = 2'-O-methylguanosine-3'-phosphate
  modified_base 4: mod_base = OTHER; note = 2'-O-methyladenosine-3'-phosphate
  modified_base 6: mod_base = OTHER; note = 2'-O-methylguanosine-3'-phosphate
  modified_base 8: mod_base = OTHER; note = 2'-O-methyluridine-3'-phosphate
  modified_base 9: mod_base = OTHER; note = 2'-O-methylguanosine-3'-phosphate
  modified_base 10: mod_base = OTHER; note = 2'-O-methylcytidine-3'-phosphate
  modified_base 11: mod_base = OTHER; note = 2'-O-methyluridine-3'-phosphate
  modified_base 13: mod_base = OTHER; note = 2'-O-methyladenosine-3'-phosphate
  modified_base 14: mod_base = OTHER; note = 2'-deoxy-2'-fluoroguanosine-3'-phosphate
  modified_base 15: mod_base = OTHER; note = 2'-O-methyladenosine-3'-phosphate
  modified_base 16: mod_base = OTHER; note = 2'-O-methyluridine-3'-phosphate
  modified_base 17: mod_base = OTHER; note = 2'-O-methylcytidine-3'-phosphate
  modified_base 18: mod_base = OTHER; note = 2'-O-methylcytidine-3'-phosphate
  modified_base 19: mod_base = OTHER; note = 2'-O-methyladenosine-3'-phosphate
  modified_base 20: mod_base = OTHER; note = 2'-O-methylguanosine-3'-phosphate
  modified_base 21: mod_base = OTHER; note = 2'-O-methylcytidine-3'-phosphorothioate
  modified_base 22: mod_base = OTHER; note = 2'-O-methyluridine-3'-phosphorothioate
  modified_base 23: mod_base = OTHER; note = 2'-O-methyluridine
  misc_feature 1: note = RNA
  misc_feature 3..4: note = RNA
  misc_feature 6: note = RNA
  misc_feature 8..11: note = RNA
  misc_feature 13..23: note = RNA
  misc_feature 2: note = DNA
  misc_feature 5: note = DNA
  misc_feature 7: note = DNA
  misc_feature 12: note = DNA
tggacgttgctaagatccagctt

SEQ ID NO: 601 - DNA, 23 bp, synthetic construct
  source 1..23: mol_type = other DNA
  modified_base 1: mod_base = OTHER; note = 2'-O-methyluridine-3'-phosphorothioate 5'-(E)-Vinylphosphonate
  modified_base 2: mod_base = OTHER; note = 2'-deoxycytidine-3'-phosphorothioate
  modified_base 3: mod_base = OTHER; note = 2'-O-methyluridine-3'-phosphate
  modified_base 4: mod_base = OTHER; note = 2'-O-methylguanosine-3'-phosphate
  modified_base 6: mod_base = OTHER; note = 2'-O-methyladenosine-3'-phosphate
  modified_base 8: mod_base = OTHER; note = 2'-O-methylguanosine-3'-phosphate
  modified_base 9: mod_base = OTHER; note = 2'-O-methyluridine-3'-phosphate
  modified_base 10: mod_base = OTHER; note = 2'-O-methyluridine-3'-phosphate
  modified_base 11: mod_base = OTHER; note = 2'-O-methylguanosine-3'-phosphate
  modified_base 13: mod_base = OTHER; note = 2'-O-methyluridine-3'-phosphate
  modified_base 14: mod_base = OTHER; note = 2'-deoxy-2'-fluoroadenosine-3'-phosphate
  modified_base 15: mod_base = OTHER; note = 2'-O-methyladenosine-3'-phosphate
  modified_base 16: mod_base = OTHER; note = 2'-O-methylguanosine-3'-phosphate
  modified_base 17: mod_base = OTHER; note = 2'-O-methyladenosine-3'-phosphate
  modified_base 18: mod_base = OTHER; note = 2'-O-methyluridine-3'-phosphate
  modified_base 19: mod_base = OTHER; note = 2'-O-methylcytidine-3'-phosphate
  modified_base 20: mod_base = OTHER; note = 2'-O-methylcytidine-3'-phosphate
  modified_base 21: mod_base = OTHER; note = 2'-O-methyladenosine-3'-phosphorothioate
  modified_base 22: mod_base = OTHER; note = 2'-O-methylguanosine-3'-phosphorothioate
  modified_base 23: mod_base = OTHER; note = 2'-O-methylcytidine
  misc_feature 1: note = RNA
  misc_feature 3..4: note = RNA
  misc_feature 6: note = RNA
  misc_feature 8..11: note = RNA
  misc_feature 13..23: note = RNA
  misc_feature 2: note = DNA
  misc_feature 5: note = DNA
  misc_feature 7: note = DNA
  misc_feature 12: note = DNA
tctggacgttgctaagatccagc

SEQ ID NO: 602 - DNA, 23 bp, synthetic construct
  source 1..23: mol_type = other DNA
  modified_base 1: mod_base = OTHER; note = 2'-O-methyluridine-3'-phosphorothioate 5'-(E)-Vinylphosphonate
  modified_base 2: mod_base = OTHER; note = 2'-deoxyadenosine-3'-phosphorothioate
  modified_base 3: mod_base = OTHER; note = 2'-O-methylcytidine-3'-phosphate
  modified_base 4: mod_base = OTHER; note = 2'-O-methyladenosine-3'-phosphate
  modified_base 6: mod_base = OTHER; note = 2'-O-methyluridine-3'-phosphate
  modified_base 8: mod_base = OTHER; note = 2'-O-methylguanosine-3'-phosphate
  modified_base 9: mod_base = OTHER; note = 2'-O-methylguanosine-3'-phosphate
  modified_base 10: mod_base = OTHER; note = 2'-O-methyladenosine-3'-phosphate
  modified_base 11: mod_base = OTHER; note = 2'-O-methylcytidine-3'-phosphate
  modified_base 13: mod_base = OTHER; note = 2'-O-methylguanosine-3'-phosphate
  modified_base 14: mod_base = OTHER; note = 2'-deoxy-2'-fluoroguanosine-3'-phosphate
  modified_base 15: mod_base = OTHER; note = 2'-O-methyladenosine-3'-phosphate
  modified_base 16: mod_base = OTHER; note = 2'-O-methylcytidine-3'-phosphate
  modified_base 17: mod_base = OTHER; note = 2'-O-methylguanosine-3'-phosphate
  modified_base 18: mod_base = OTHER; note = 2'-O-methyluridine-3'-phosphate
  modified_base 19: mod_base = OTHER; note = 2'-O-methyluridine-3'-phosphate
  modified_base 20: mod_base = OTHER; note = 2'-O-methylguanosine-3'-phosphate
  modified_base 21: mod_base = OTHER; note = 2'-O-methylcytidine-3'-phosphorothioate
  modified_base 22: mod_base = OTHER; note = 2'-O-methyluridine-3'-phosphorothioate
  modified_base 23: mod_base = OTHER; note = 2'-O-methyladenosine
  misc_feature 1: note = RNA
  misc_feature 3..4: note = RNA
  misc_feature 6: note = RNA
  misc_feature 8..11: note = RNA
  misc_feature 13..23: note = RNA
  misc_feature 2: note = DNA
  misc_feature 5: note = DNA
  misc_feature 7: note = DNA
  misc_feature 12: note = DNA
tacacttggactggacgttgcta

SEQ ID NO: 603 - DNA, 23 bp, synthetic construct
  source 1..23: mol_type = other DNA
  modified_base 1: mod_base = OTHER; note = 2'-O-methyluridine-3'-phosphorothioate 5'-(E)-Vinylphosphonate
  modified_base 2: mod_base = OTHER; note = 2'-deoxycytidine-3'-phosphorothioate
  modified_base 3: mod_base = OTHER; note = 2'-O-methyladenosine-3'-phosphate
  modified_base 4: mod_base = OTHER; note = 2'-O-methylcytidine-3'-phosphate
  modified_base 6: mod_base = OTHER; note = 2'-O-methylcytidine-3'-phosphate
  modified_base 8: mod_base = OTHER; note = 2'-O-methyluridine-3'-phosphate
  modified_base 9: mod_base = OTHER; note = 2'-O-methylguanosine-3'-phosphate
  modified_base 10: mod_base = OTHER; note = 2'-O-methylguanosine-3'-phosphate
  modified_base 11: mod_base = OTHER; note = 2'-O-methyladenosine-3'-phosphate
  modified_base 13: mod_base = OTHER; note = 2'-O-methyluridine-3'-phosphate
  modified_base 14: mod_base = OTHER; note = 2'-deoxy-2'-fluoroguanosine-3'-phosphate
  modified_base 15: mod_base = OTHER; note = 2'-O-methylguanosine-3'-phosphate
  modified_base 16: mod_base = OTHER; note = 2'-O-methyladenosine-3'-phosphate
  modified_base 17: mod_base = OTHER; note = 2'-O-methylcytidine-3'-phosphate
  modified_base 18: mod_base = OTHER; note = 2'-O-methylguanosine-3'-phosphate
  modified_base 19: mod_base = OTHER; note = 2'-O-methyluridine-3'-phosphate
  modified_base 20: mod_base = OTHER; note = 2'-O-methyluridine-3'-phosphate
  modified_base 21: mod_base = OTHER; note = 2'-O-methylguanosine-3'-phosphorothioate
  modified_base 22: mod_base = OTHER; note = 2'-O-methylcytidine-3'-phosphorothioate
  modified_base 23: mod_base = OTHER; note = 2'-O-methyluridine
  misc_feature 1: note = RNA
  misc_feature 3..4: note = RNA
  misc_feature 6: note = RNA
  misc_feature 8..11: note = RNA
  misc_feature 13..23: note = RNA
  misc_feature 2: note = DNA
  misc_feature 5: note = DNA
  misc_feature 7: note = DNA
  misc_feature 12: note = DNA
tcacacttggactggacgttgct

SEQ ID NO: 604 - DNA, 23 bp, synthetic construct
  source 1..23: mol_type = other DNA
  modified_base 1: mod_base = OTHER; note = 2'-O-methyluridine-3'-phosphorothioate 5'-(E)-Vinylphosphonate
  modified_base 2: mod_base = OTHER; note = 2'-deoxycytidine-3'-phosphorothioate
  modified_base 3: mod_base = OTHER; note = 2'-O-methylcytidine-3'-phosphate
  modified_base 4: mod_base = OTHER; note = 2'-O-methyladenosine-3'-phosphate
  modified_base 6: mod_base = OTHER; note = 2'-O-methyladenosine-3'-phosphate
  modified_base 8: mod_base = OTHER; note = 2'-O-methyluridine-3'-phosphate
  modified_base 9: mod_base = OTHER; note = 2'-O-methyluridine-3'-phosphate
  modified_base 10: mod_base = OTHER; note = 2'-O-methylguanosine-3'-phosphate
  modified_base 11: mod_base = OTHER; note = 2'-O-methylguanosine-3'-phosphate
  modified_base 13: mod_base = OTHER; note = 2'-O-methylcytidine-3'-phosphate
  modified_base 14: mod_base = OTHER; note = 2'-deoxy-2'-fluorouridine-3'-phosphate
  modified_base 15: mod_base = OTHER; note = 2'-O-methylguanosine-3'-phosphate
  modified_base 16: mod_base = OTHER; note = 2'-O-methylguanosine-3'-phosphate
  modified_base 17: mod_base = OTHER; note = 2'-O-methyladenosine-3'-phosphate
  modified_base 18: mod_base = OTHER; note = 2'-O-methylcytidine-3'-phosphate
  modified_base 19: mod_base = OTHER; note = 2'-O-methylguanosine-3'-phosphate
  modified_base 20: mod_base = OTHER; note = 2'-O-methyluridine-3'-phosphate
  modified_base 21: mod_base = OTHER; note = 2'-O-methyluridine-3'-phosphorothioate
  modified_base 22: mod_base = OTHER; note = 2'-O-methylguanosine-3'-phosphorothioate
  modified_base 23: mod_base = OTHER; note = 2'-O-methylcytidine
  misc_feature 1: note = RNA
  misc_feature 3..4: note = RNA
  misc_feature 6: note = RNA
  misc_feature 8..11: note = RNA
  misc_feature 13..23: note = RNA
  misc_feature 2: note = DNA
  misc_feature 5: note = DNA
  misc_feature 7: note = DNA
  misc_feature 12: note = DNA
tccacacttggactggacgttgc

SEQ ID NO: 605 - DNA, 23 bp, synthetic construct
  source 1..23: mol_type = other DNA
  modified_base 1: mod_base = OTHER; note = 2'-O-methyluridine-3'-phosphorothioate 5'-(E)-Vinylphosphonate
  modified_base 2: mod_base = OTHER; note = 2'-deoxycytidine-3'-phosphorothioate
  modified_base 3: mod_base = OTHER; note = 2'-O-methylcytidine-3'-phosphate
  modified_base 4: mod_base = OTHER; note = 2'-O-methyluridine-3'-phosphate
  modified_base 6: mod_base = OTHER; note = 2'-O-methyluridine-3'-phosphate
  modified_base 8: mod_base = OTHER; note = 2'-O-methyladenosine-3'-phosphate
  modified_base 9: mod_base = OTHER; note = 2'-O-methylguanosine-3'-phosphate
  modified_base 10: mod_base = OTHER; note = 2'-O-methylcytidine-3'-phosphate
  modified_base 11: mod_base = OTHER; note = 2'-O-methylcytidine-3'-phosphate
  modified_base 13: mod_base = OTHER; note = 2'-O-methylcytidine-3'-phosphate
  modified_base 14: mod_base = OTHER; note = 2'-deoxy-2'-fluoroadenosine-3'-phosphate
  modified_base 15: mod_base = OTHER; note = 2'-O-methylcytidine-3'-phosphate
  modified_base 16: mod_base = OTHER; note = 2'-O-methyluridine-3'-phosphate
  modified_base 17: mod_base = OTHER; note = 2'-O-methyluridine-3'-phosphate
  modified_base 18: mod_base = OTHER; note = 2'-O-methylguanosine-3'-phosphate
  modified_base 19: mod_base = OTHER; note = 2'-O-methylguanosine-3'-phosphate
  modified_base 20: mod_base = OTHER; note = 2'-O-methyladenosine-3'-phosphate
  modified_base 21: mod_base = OTHER; note = 2'-O-methylcytidine-3'-phosphorothioate
  modified_base 22: mod_base = OTHER; note = 2'-O-methyluridine-3'-phosphorothioate
  modified_base 23: mod_base = OTHER; note = 2'-O-methylguanosine
  misc_feature 1: note = RNA
  misc_feature 3..4: note = RNA
  misc_feature 6: note = RNA
  misc_feature 8..11: note = RNA
  misc_feature 13..23: note = RNA
  misc_feature 2: note = DNA
  misc_feature 5: note = DNA
  misc_feature 7: note = DNA
  misc_feature 12: note = DNA
tcctttgagccacacttggactg

SEQ ID NO: 606 - DNA, 23 bp, synthetic construct
  source 1..23: mol_type = other DNA
  modified_base 1: mod_base = OTHER; note = 2'-O-methyluridine-3'-phosphorothioate 5'-(E)-Vinylphosphonate
  modified_base 2: mod_base = OTHER; note = 2'-deoxythymidine-3'-phosphorothioate
  modified_base 3: mod_base = OTHER; note = 2'-O-methylcytidine-3'-phosphate
  modified_base 4: mod_base = OTHER; note = 2'-O-methylcytidine-3'-phosphate
  modified_base 6: mod_base = OTHER; note = 2'-O-methyluridine-3'-phosphate
  modified_base 8: mod_base = OTHER; note = 2'-O-methylguanosine-3'-phosphate
  modified_base 9: mod_base = OTHER; note = 2'-O-methyladenosine-3'-phosphate
  modified_base 10: mod_base = OTHER; note = 2'-O-methylguanosine-3'-phosphate
  modified_base 11: mod_base = OTHER; note = 2'-O-methylcytidine-3'-phosphate
  modified_base 13: mod_base = OTHER; note = 2'-O-methyladenosine-3'-phosphate
  modified_base 14: mod_base = OTHER; note = 2'-deoxy-2'-fluorocytidine-3'-phosphate
  modified_base 15: mod_base = OTHER; note = 2'-O-methyladenosine-3'-phosphate
  modified_base 16: mod_base = OTHER; note = 2'-O-methylcytidine-3'-phosphate
  modified_base 17: mod_base = OTHER; note = 2'-O-methyluridine-3'-phosphate
  modified_base 18: mod_base = OTHER; note = 2'-O-methyluridine-3'-phosphate
  modified_base 19: mod_base = OTHER; note = 2'-O-methylguanosine-3'-phosphate
  modified_base 20: mod_base = OTHER; note = 2'-O-methylguanosine-3'-phosphate
  modified_base 21: mod_base = OTHER; note = 2'-O-methyladenosine-3'-phosphorothioate
  modified_base 22: mod_base = OTHER; note = 2'-O-methylcytidine-3'-phosphorothioate
  modified_base 23: mod_base = OTHER; note = 2'-O-methyluridine
  misc_feature 1: note = RNA
  misc_feature 3..4: note = RNA
  misc_feature 6: note = RNA
  misc_feature 8..11: note = RNA
  misc_feature 13..23: note = RNA
  misc_feature 2: note = DNA
  misc_feature 5: note = DNA
  misc_feature 7: note = DNA
  misc_feature 12: note = DNA
ttcctttgagccacacttggact

SEQ ID NO: 607 - DNA, 23 bp, synthetic construct
  source 1..23: mol_type = other DNA
  modified_base 1: mod_base = OTHER; note = 2'-O-methyluridine-3'-phosphorothioate 5'-(E)-Vinylphosphonate
  modified_base 2: mod_base = OTHER; note = 2'-deoxyadenosine-3'-phosphorothioate
  modified_base 3: mod_base = OTHER; note = 2'-O-methyluridine-3'-phosphate
  modified_base 4: mod_base = OTHER; note = 2'-O-methylcytidine-3'-phosphate
  modified_base 6: mod_base = OTHER; note = 2'-O-methyluridine-3'-phosphate
  modified_base 8: mod_base = OTHER; note = 2'-O-methyluridine-3'-phosphate
  modified_base 9: mod_base = OTHER; note = 2'-O-methylguanosine-3'-phosphate
  modified_base 10: mod_base = OTHER; note = 2'-O-methyladenosine-3'-phosphate
  modified_base 11: mod_base = OTHER; note = 2'-O-methylguanosine-3'-phosphate
  modified_base 13: mod_base = OTHER; note = 2'-O-methylcytidine-3'-phosphate
  modified_base 14: mod_base = OTHER; note = 2'-deoxy-2'-fluoroadenosine-3'-phosphate
  modified_base 15: mod_base = OTHER; note = 2'-O-methylcytidine-3'-phosphate
  modified_base 16: mod_base = OTHER; note = 2'-O-methyladenosine-3'-phosphate
  modified_base 17: mod_base = OTHER; note = 2'-O-methylcytidine-3'-phosphate
  modified_base 18: mod_base = OTHER; note = 2'-O-methyluridine-3'-phosphate
  modified_base 19: mod_base = OTHER; note = 2'-O-methyluridine-3'-phosphate
  modified_base 20: mod_base = OTHER; note = 2'-O-methylguanosine-3'-phosphate
  modified_base 21: mod_base = OTHER; note = 2'-O-methylguanosine-3'-phosphorothioate
  modified_base 22: mod_base = OTHER; note = 2'-O-methyladenosine-3'-phosphorothioate
  modified_base 23: mod_base = OTHER; note = 2'-O-methylcytidine
  misc_feature 1: note = RNA
  misc_feature 3..4: note = RNA
  misc_feature 6: note = RNA
  misc_feature 8..11: note = RNA
  misc_feature 13..23: note = RNA
  misc_feature 2: note = DNA
  misc_feature 5: note = DNA
  misc_feature 7: note = DNA
  misc_feature 12: note = DNA
tatcctttgagccacacttggac

SEQ ID NO: 608 - DNA, 23 bp, synthetic construct
  source 1..23: mol_type = other DNA
  modified_base 1: mod_base = OTHER; note = 2'-O-methyluridine-3'-phosphorothioate 5'-(E)-Vinylphosphonate
  modified_base 2: mod_base = OTHER; note = 2'-deoxyguanosine-3'-phosphorothioate
  modified_base 3: mod_base = OTHER; note = 2'-O-methyladenosine-3'-phosphate
  modified_base 4: mod_base = OTHER; note = 2'-O-methyluridine-3'-phosphate
  modified_base 6: mod_base = OTHER; note = 2'-O-methyluridine-3'-phosphate
  modified_base 8: mod_base = OTHER; note = 2'-O-methyladenosine-3'-phosphate
  modified_base 9: mod_base = OTHER; note = 2'-O-methyluridine-3'-phosphate
  modified_base 10: mod_base = OTHER; note = 2'-O-methylcytidine-3'-phosphate
  modified_base 11: mod_base = OTHER; note = 2'-O-methylcytidine-3'-phosphate
  modified_base 13: mod_base = OTHER; note = 2'-O-methyluridine-3'-phosphate
  modified_base 14: mod_base = OTHER; note = 2'-deoxy-2'-fluorouridine-3'-phosphate
  modified_base 15: mod_base = OTHER; note = 2'-O-methylguanosine-3'-phosphate
  modified_base 16: mod_base = OTHER; note = 2'-O-methyladenosine-3'-phosphate
  modified_base 17: mod_base = OTHER; note = 2'-O-methylguanosine-3'-phosphate
  modified_base 18: mod_base = OTHER; note = 2'-O-methylcytidine-3'-phosphate
  modified_base 19: mod_base = OTHER; note = 2'-O-methylcytidine-3'-phosphate
  modified_base 20: mod_base = OTHER; note = 2'-O-methyladenosine-3'-phosphate
  modified_base 21: mod_base = OTHER; note = 2'-O-methylcytidine-3'-phosphorothioate
  modified_base 22: mod_base = OTHER; note = 2'-O-methyladenosine-3'-phosphorothioate
  modified_base 23: mod_base = OTHER; note = 2'-O-methylcytidine
  misc_feature 1: note = RNA
  misc_feature 3..4: note = RNA
  misc_feature 6: note = RNA
  misc_feature 8..11: note = RNA
  misc_feature 13..23: note = RNA
  misc_feature 2: note = DNA
  misc_feature 5: note = DNA
  misc_feature 7: note = DNA
  misc_feature 12: note = DNA
tgatattatcctttgagccacac

SEQ ID NO: 609 - DNA, 23 bp, synthetic construct
  source 1..23: mol_type = other DNA
  modified_base 1: mod_base = OTHER; note = 2'-O-methyluridine-3'-phosphorothioate 5'-(E)-Vinylphosphonate
  modified_base 2: mod_base = OTHER; note = 2'-deoxythymidine-3'-phosphorothioate
  modified_base 3: mod_base = OTHER; note = 2'-O-methyluridine-3'-phosphate
  modified_base 4: mod_base = OTHER; note = 2'-O-methylguanosine-3'-phosphate
  modified_base 6: mod_base = OTHER; note = 2'-O-methyluridine-3'-phosphate
  modified_base 8: mod_base = OTHER; note = 2'-O-methyluridine-3'-phosphate
  modified_base 9: mod_base = OTHER; note = 2'-O-methyluridine-3'-phosphate
  modified_base 10: mod_base = OTHER; note = 2'-O-methyladenosine-3'-phosphate
  modified_base 11: mod_base = OTHER; note = 2'-O-methyluridine-3'-phosphate
  modified_base 13: mod_base = OTHER; note = 2'-O-methylcytidine-3'-phosphate
  modified_base 14: mod_base = OTHER; note = 2'-deoxy-2'-fluorouridine-3'-phosphate
  modified_base 15: mod_base = OTHER; note = 2'-O-methyluridine-3'-phosphate
  modified_base 16: mod_base = OTHER; note = 2'-O-methyluridine-3'-phosphate
  modified_base 17: mod_base = OTHER; note = 2'-O-methylguanosine-3'-phosphate
  modified_base 18: mod_base = OTHER; note = 2'-O-methyladenosine-3'-phosphate
  modified_base 19: mod_base = OTHER; note = 2'-O-methylguanosine-3'-phosphate
  modified_base 20: mod_base = OTHER; note = 2'-O-methylcytidine-3'-phosphate
  modified_base 21: mod_base = OTHER; note = 2'-O-methylcytidine-3'-phosphorothioate
  modified_base 22: mod_base = OTHER; note = 2'-O-methyladenosine-3'-phosphorothioate
  modified_base 23: mod_base = OTHER; note = 2'-O-methylcytidine
  misc_feature 1: note = RNA
  misc_feature 3..4: note = RNA
  misc_feature 6: note = RNA
  misc_feature 8..11: note = RNA
  misc_feature 13..23: note = RNA
  misc_feature 2: note = DNA
  misc_feature 5: note = DNA
  misc_feature 7: note = DNA
  misc_feature 12: note = DNA
tttgatattatcctttgagccac

SEQ ID NO: 610 - DNA, 23 bp, synthetic construct
  source 1..23: mol_type = other DNA
  modified_base 1: mod_base = OTHER; note = 2'-O-methyluridine-3'-phosphorothioate 5'-(E)-Vinylphosphonate
  modified_base 2: mod_base = OTHER; note = 2'-deoxyguanosine-3'-phosphorothioate
  modified_base 3: mod_base = OTHER; note = 2'-O-methylguanosine-3'-phosphate
  modified_base 4: mod_base = OTHER; note = 2'-O-methyladenosine-3'-phosphate
  modified_base 6: mod_base = OTHER; note = 2'-O-methylguanosine-3'-phosphate
  modified_base 8: mod_base = OTHER; note = 2'-O-methylguanosine-3'-phosphate
  modified_base 9: mod_base = OTHER; note = 2'-O-methyluridine-3'-phosphate
  modified_base 10: mod_base = OTHER; note = 2'-O-methyluridine-3'-phosphate
  modified_base 11: mod_base = OTHER; note = 2'-O-methyluridine-3'-phosphate
  modified_base 13: mod_base = OTHER; note = 2'-O-methyladenosine-3'-phosphate
  modified_base 14: mod_base = OTHER; note = 2'-deoxy-2'-fluorouridine-3'-phosphate
  modified_base 15: mod_base = OTHER; note = 2'-O-methyladenosine-3'-phosphate
  modified_base 16: mod_base = OTHER; note = 2'-O-methyluridine-3'-phosphate
  modified_base 17: mod_base = OTHER; note = 2'-O-methyluridine-3'-phosphate
  modified_base 18: mod_base = OTHER; note = 2'-O-methyladenosine-3'-phosphate
  modified_base 19: mod_base = OTHER; note = 2'-O-methyluridine-3'-phosphate
  modified_base 20: mod_base = OTHER; note = 2'-O-methylcytidine-3'-phosphate
  modified_base 21: mod_base = OTHER; note = 2'-O-methylcytidine-3'-phosphorothioate
  modified_base 22: mod_base = OTHER; note = 2'-O-methyluridine-3'-phosphorothioate
  modified_base 23: mod_base = OTHER; note = 2'-O-methyluridine
  misc_feature 1: note = RNA
  misc_feature 3..4: note = RNA
  misc_feature 6: note = RNA
  misc_feature 8..11: note = RNA
  misc_feature 13..23: note = RNA
  misc_feature 2: note = DNA
  misc_feature 5: note = DNA
  misc_feature 7: note = DNA
  misc_feature 12: note = DNA
tggacgtgtttgatattatcctt

SEQ ID NO: 611 - DNA, 23 bp, synthetic construct
  source 1..23: mol_type = other DNA
  modified_base 1: mod_base = OTHER; note = 2'-O-methyluridine-3'-phosphorothioate 5'-(E)-Vinylphosphonate
  modified_base 2: mod_base = OTHER; note = 2'-deoxycytidine-3'-phosphorothioate
  modified_base 3: mod_base = OTHER; note = 2'-O-methylguanosine-3'-phosphate
  modified_base 4: mod_base = OTHER; note = 2'-O-methylguanosine-3'-phosphate
  modified_base 6: mod_base = OTHER; note = 2'-O-methyladenosine-3'-phosphate
  modified_base 8: mod_base = OTHER; note = 2'-O-methylguanosine-3'-phosphate
  modified_base 9: mod_base = OTHER; note = 2'-O-methyluridine-3'-phosphate
  modified_base 10: mod_base = OTHER; note = 2'-O-methylguanosine-3'-phosphate
  modified_base 11: mod_base = OTHER; note = 2'-O-methyluridine-3'-phosphate
  modified_base 13: mod_base = OTHER; note = 2'-O-methyluridine-3'-phosphate
  modified_base 14: mod_base = OTHER; note = 2'-deoxy-2'-fluoroguanosine-3'-phosphate
  modified_base 15: mod_base = OTHER; note = 2'-O-methyladenosine-3'-phosphate
  modified_base 16: mod_base = OTHER; note = 2'-O-methyluridine-3'-phosphate
  modified_base 17: mod_base = OTHER; note = 2'-O-methyladenosine-3'-phosphate
  modified_base 18: mod_base = OTHER; note = 2'-O-methyluridine-3'-phosphate
  modified_base 19: mod_base = OTHER; note = 2'-O-methyluridine-3'-phosphate
  modified_base 20: mod_base = OTHER; note = 2'-O-methyladenosine-3'-phosphate
  modified_base 21: mod_base = OTHER; note = 2'-O-methyluridine-3'-phosphorothioate
  modified_base 22: mod_base = OTHER; note = 2'-O-methylcytidine-3'-phosphorothioate
  modified_base 23: mod_base = OTHER; note = 2'-O-methylcytidine
  misc_feature 1: note = RNA
  misc_feature 3..4: note = RNA
  misc_feature 6: note = RNA
  misc_feature 8..11: note = RNA
  misc_feature 13..23: note = RNA
  misc_feature 2: note = DNA
  misc_feature 5: note = DNA
  misc_feature 7: note = DNA
  misc_feature 12: note = DNA
tcgggacgtgtttgatattatcc

SEQ ID NO: 612 - DNA, 23 bp, synthetic construct
  source 1..23: mol_type = other DNA
  modified_base 1: mod_base = OTHER; note = 2'-O-methyluridine-3'-phosphorothioate 5'-(E)-Vinylphosphonate
  modified_base 2: mod_base = OTHER; note = 2'-deoxycytidine-3'-phosphorothioate
  modified_base 3: mod_base = OTHER; note = 2'-O-methylcytidine-3'-phosphate
  modified_base 4: mod_base = OTHER; note = 2'-O-methylcytidine-3'-phosphate
  modified_base 6: mod_base = OTHER; note = 2'-O-methylguanosine-3'-phosphate
  modified_base 8: mod_base = OTHER; note = 2'-O-methyladenosine-3'-phosphate
  modified_base 9: mod_base = OTHER; note = 2'-O-methylcytidine-3'-phosphate
  modified_base 10: mod_base = OTHER; note = 2'-O-methylguanosine-3'-phosphate
  modified_base 11: mod_base = OTHER; note = 2'-O-methyluridine-3'-phosphate
  modified_base 13: mod_base = OTHER; note = 2'-O-methyluridine-3'-phosphate
  modified_base 14: mod_base = OTHER; note = 2'-deoxy-2'-fluorouridine-3'-phosphate
  modified_base 15: mod_base = OTHER; note = 2'-O-methyluridine-3'-phosphate
  modified_base 16: mod_base = OTHER; note = 2'-O-methylguanosine-3'-phosphate
  modified_base 17: mod_base = OTHER; note = 2'-O-methyladenosine-3'-phosphate
  modified_base 18: mod_base = OTHER; note = 2'-O-methyluridine-3'-phosphate
  modified_base 19: mod_base = OTHER; note = 2'-O-methyladenosine-3'-phosphate
  modified_base 20: mod_base = OTHER; note = 2'-O-methyluridine-3'-phosphate
  modified_base 21: mod_base = OTHER; note = 2'-O-methyluridine-3'-phosphorothioate
  modified_base 22: mod_base = OTHER; note = 2'-O-methyladenosine-3'-phosphorothioate
  modified_base 23: mod_base = OTHER; note = 2'-O-methyluridine
  misc_feature 1: note = RNA
  misc_feature 3..4: note = RNA
  misc_feature 6: note = RNA
  misc_feature 8..11: note = RNA
  misc_feature 13..23: note = RNA
  misc_feature 2: note = DNA
  misc_feature 5: note = DNA
  misc_feature 7: note = DNA
  misc_feature 12: note = DNA
tcccgggacgtgtttgatattat

SEQ ID NO: 613 - DNA, 23 bp, synthetic construct
  source 1..23: mol_type = other DNA
  modified_base 1: mod_base = OTHER; note = 2'-O-methyluridine-3'-phosphorothioate 5'-(E)-Vinylphosphonate
  modified_base 2: mod_base = OTHER; note = 2'-deoxycytidine-3'-phosphorothioate
  modified_base 3: mod_base = OTHER; note = 2'-O-methyluridine-3'-phosphate
  modified_base 4: mod_base = OTHER; note = 2'-O-methylcytidine-3'-phosphate
  modified_base 6: mod_base = OTHER; note = 2'-O-methylcytidine-3'-phosphate
  modified_base 8: mod_base = OTHER; note = 2'-O-methylguanosine-3'-phosphate
  modified_base 9: mod_base = OTHER; note = 2'-O-methylguanosine-3'-phosphate
  modified_base 10: mod_base = OTHER; note = 2'-O-methyladenosine-3'-phosphate
  modified_base 11: mod_base = OTHER; note = 2'-O-methylcytidine-3'-phosphate
  modified_base 13: mod_base = OTHER; note = 2'-O-methyluridine-3'-phosphate
  modified_base 14: mod_base = OTHER; note = 2'-deoxy-2'-fluoroguanosine-3'-phosphate
  modified_base 15: mod_base = OTHER; note = 2'-O-methyluridine-3'-phosphate
  modified_base 16: mod_base = OTHER; note = 2'-O-methyluridine-3'-phosphate
  modified_base 17: mod_base = OTHER; note = 2'-O-methyluridine-3'-phosphate
  modified_base 18: mod_base = OTHER; note = 2'-O-methylguanosine-3'-phosphate
  modified_base 19: mod_base = OTHER; note = 2'-O-methyladenosine-3'-phosphate
  modified_base 20: mod_base = OTHER; note = 2'-O-methyluridine-3'-phosphate
  modified_base 21: mod_base = OTHER; note = 2'-O-methyladenosine-3'-phosphorothioate
  modified_base 22: mod_base = OTHER; note = 2'-O-methyluridine-3'-phosphorothioate
  modified_base 23: mod_base = OTHER; note = 2'-O-methyluridine
  misc_feature 1: note = RNA
  misc_feature 3..4: note = RNA
  misc_feature 6: note = RNA
  misc_feature 8..11: note = RNA
  misc_feature 13..23: note = RNA
  misc_feature 2: note = DNA
  misc_feature 5: note = DNA
  misc_feature 7: note = DNA
  misc_feature 12: note = DNA
tctcccgggacgtgtttgatatt

SEQ ID NO: 614 - DNA, 23 bp, synthetic construct
  source 1..23: mol_type = other DNA
  modified_base 1: mod_base = OTHER; note = 2'-O-methyluridine-3'-phosphorothioate 5'-(E)-Vinylphosphonate
  modified_base 2: mod_base = OTHER; note = 2'-deoxycytidine-3'-phosphorothioate
  modified_base 3: mod_base = OTHER; note = 2'-O-methylcytidine-3'-phosphate
  modified_base 4: mod_base = OTHER; note = 2'-O-methyluridine-3'-phosphate
  modified_base 6: mod_base = OTHER; note = 2'-O-methylcytidine-3'-phosphate
  modified_base 8: mod_base = OTHER; note = 2'-O-methylguanosine-3'-phosphate
  modified_base 9: mod_base = OTHER; note = 2'-O-methylguanosine-3'-phosphate
  modified_base 10: mod_base = OTHER; note = 2'-O-methylguanosine-3'-phosphate
  modified_base 11: mod_base = OTHER; note = 2'-O-methyladenosine-3'-phosphate
  modified_base 13: mod_base = OTHER; note = 2'-O-methylguanosine-3'-phosphate
  modified_base 14: mod_base = OTHER; note = 2'-deoxy-2'-fluorouridine-3'-phosphate
  modified_base 15: mod_base = OTHER; note = 2'-O-methylguanosine-3'-phosphate
  modified_base 16: mod_base = OTHER; note = 2'-O-methyluridine-3'-phosphate
  modified_base 17: mod_base = OTHER; note = 2'-O-methyluridine-3'-phosphate
  modified_base 18: mod_base = OTHER; note = 2'-O-methyluridine-3'-phosphate
  modified_base 19: mod_base = OTHER; note = 2'-O-methylguanosine-3'-phosphate
  modified_base 20: mod_base = OTHER; note = 2'-O-methyladenosine-3'-phosphate
  modified_base 21: mod_base = OTHER; note = 2'-O-methyluridine-3'-phosphorothioate
  modified_base 22: mod_base = OTHER; note = 2'-O-methyladenosine-3'-phosphorothioate
  modified_base 23: mod_base = OTHER; note = 2'-O-methyluridine
  misc_feature 1: note = RNA
  misc_feature 3..4: note = RNA
  misc_feature 6: note = RNA
  misc_feature 8..11: note = RNA
  misc_feature 13..23: note = RNA
  misc_feature 2: note = DNA
  misc_feature 5: note = DNA
  misc_feature 7: note = DNA
  misc_feature 12: note = DNA
tcctcccgggacgtgtttgatat

SEQ ID NO: 615 - DNA, 23 bp, synthetic construct
  source 1..23: mol_type = other DNA
  modified_base 1: mod_base = OTHER; note = 2'-O-methyluridine-3'-phosphorothioate 5'-(E)-Vinylphosphonate
  modified_base 2: mod_base = OTHER; note = 2'-deoxythymidine-3'-phosphorothioate
  modified_base 3: mod_base = OTHER; note = 2'-O-methylguanosine-3'-phosphate
  modified_base 4: mod_base = OTHER; note = 2'-O-methyluridine-3'-phosphate
  modified_base 6: mod_base = OTHER; note = 2'-O-methyluridine-3'-phosphate
  modified_base 7: mod_base = OTHER; note = guanosine-2'-phosphate
  modified_base 8: mod_base = OTHER; note = 2'-O-methyladenosine-3'-phosphate
  modified_base 9: mod_base = OTHER; note = 2'-O-methyluridine-3'-phosphate
  modified_base 10: mod_base = OTHER; note = 2'-O-methyladenosine-3'-phosphate
  modified_base 11: mod_base = OTHER; note = 2'-O-methyluridine-3'-phosphate
  modified_base 13: mod_base = OTHER; note = 2'-O-methyladenosine-3'-phosphate
  modified_base 14: mod_base = OTHER; note = 2'-deoxy-2'-fluorouridine-3'-phosphate
  modified_base 15: mod_base = OTHER; note = 2'-O-methylcytidine-3'-phosphate
  modified_base 16: mod_base = OTHER; note = 2'-O-methylcytidine-3'-phosphate
  modified_base 17: mod_base = OTHER; note = 2'-O-methyluridine-3'-phosphate
  modified_base 18: mod_base = OTHER; note = 2'-O-methyluridine-3'-phosphate
  modified_base 19: mod_base = OTHER; note = 2'-O-methyluridine-3'-phosphate
  modified_base 20: mod_base = OTHER; note = 2'-O-methylguanosine-3'-phosphate
  modified_base 21: mod_base = OTHER; note = 2'-O-methyladenosine-3'-phosphorothioate
  modified_base 22: mod_base = OTHER; note = 2'-O-methylguanosine-3'-phosphorothioate
  modified_base 23: mod_base = OTHER; note = 2'-O-methylcytidine
  misc_feature 1: note = RNA
  misc_feature 3..4: note = RNA
  misc_feature 6..11: note = RNA
  misc_feature 13..23: note = RNA
  misc_feature 2: note = DNA
  misc_feature 5: note = DNA
  misc_feature 12: note = DNA
ttgtttgatattatcctttgagc

SEQ ID NO: 616 - DNA, 23 bp, synthetic construct
  source 1..23: mol_type = other DNA
  modified_base 1: mod_base = OTHER; note = 2'-O-methyluridine-3'-phosphorothioate 5'-(E)-Vinylphosphonate
  modified_base 2: mod_base = OTHER; note = 2'-deoxyguanosine-3'-phosphorothioate
  modified_base 3: mod_base = OTHER; note = 2'-O-methyluridine-3'-phosphate
  modified_base 4: mod_base = OTHER; note = 2'-O-methylguanosine-3'-phosphate
  modified_base 6: mod_base = OTHER; note = 2'-O-methyluridine-3'-phosphate
  modified_base 7: mod_base = OTHER; note = Thymidine-glycol nucleic acid (GNA), S-Isomer
  modified_base 8: mod_base = OTHER; note = 2'-O-methylguanosine-3'-phosphate
  modified_base 9: mod_base = OTHER; note = 2'-O-methyladenosine-3'-phosphate
  modified_base 10: mod_base = OTHER; note = 2'-O-methyluridine-3'-phosphate
  modified_base 11: mod_base = OTHER; note = 2'-O-methyladenosine-3'-phosphate
  modified_base 13: mod_base = OTHER; note = 2'-O-methyluridine-3'-phosphate
  modified_base 14: mod_base = OTHER; note = 2'-deoxy-2'-fluoroadenosine-3'-phosphate
  modified_base 15: mod_base = OTHER; note = 2'-O-methyluridine-3'-phosphate
  modified_base 16: mod_base = OTHER; note = 2'-O-methylcytidine-3'-phosphate
  modified_base 17: mod_base = OTHER; note = 2'-O-methylcytidine-3'-phosphate
  modified_base 18: mod_base = OTHER; note = 2'-O-methyluridine-3'-phosphate
  modified_base 19: mod_base = OTHER; note = 2'-O-methyluridine-3'-phosphate
  modified_base 20: mod_base = OTHER; note = 2'-O-methyluridine-3'-phosphate
  modified_base 21: mod_base = OTHER; note = 2'-O-methylguanosine-3'-phosphorothioate
  modified_base 22: mod_base = OTHER; note = 2'-O-methyladenosine-3'-phosphorothioate
  modified_base 23: mod_base = OTHER; note = 2'-O-methylguanosine
  misc_feature 1: note = RNA
  misc_feature 3..4: note = RNA
  misc_feature 6..11: note = RNA
  misc_feature 13..23: note = RNA
  misc_feature 2: note = DNA
  misc_feature 5: note = DNA
  misc_feature 12: note = DNA
tgtgtttgatattatcctttgag

SEQ ID NO: 617 - RNA, 23 nt, synthetic construct
  source 1..23: mol_type = other RNA
gcagataattaataagaagctgg

SEQ ID NO: 618 - RNA, 23 nt, synthetic construct
  source 1..23: mol_type = other RNA
aattaataagaagctggatctta

SEQ ID NO: 619 - RNA, 23 nt, synthetic construct
  source 1..23: mol_type = other RNA
taataagaagctggatcttagca

SEQ ID NO: 620 - RNA, 23 nt, synthetic construct
  source 1..23: mol_type = other RNA
gaagctggatcttagcaacgtcc

SEQ ID NO: 621 - RNA, 23 nt, synthetic construct
  source 1..23: mol_type = other RNA
aagctggatcttagcaacgtcca

SEQ ID NO: 622 - RNA, 23 nt, synthetic construct
  source 1..23: mol_type = other RNA
gctggatcttagcaacgtccagt

SEQ ID NO: 623 - RNA, 23 nt, synthetic construct
  source 1..23: mol_type = other RNA
tagcaacgtccagtccaagtgtg

SEQ ID NO: 624 - RNA, 23 nt, synthetic construct
  source 1..23: mol_type = other RNA
agcaacgtccagtccaagtgtgg

SEQ ID NO: 625 - RNA, 23 nt, synthetic construct
  source 1..23: mol_type = other RNA
gcaacgtccagtccaagtgtggc

SEQ ID NO: 626 - RNA, 23 nt, synthetic construct
  source 1..23: mol_type = other RNA
cagtccaagtgtggctcaaagga

SEQ ID NO: 627 - RNA, 23 nt, synthetic construct
  source 1..23: mol_type = other RNA
agtccaagtgtggctcaaaggat

SEQ ID NO: 628 - RNA, 23 nt, synthetic construct
  source 1..23: mol_type = other RNA
gtccaagtgtggctcaaaggata

SEQ ID NO: 629 - RNA, 23 nt, synthetic construct
  source 1..23: mol_type = other RNA
gtgtggctcaaaggataatatca

SEQ ID NO: 630 - RNA, 23 nt, synthetic construct
  source 1..23: mol_type = other RNA
gtggctcaaaggataatatcaaa

SEQ ID NO: 631 - RNA, 23 nt, synthetic construct
  source 1..23: mol_type = other RNA
aaggataatatcaaacacgtccc

SEQ ID NO: 632 - RNA, 23 nt, synthetic construct
  source 1..23: mol_type = other RNA
ggataatatcaaacacgtcccgg

SEQ ID NO: 633 - RNA, 23 nt, synthetic construct
  source 1..23: mol_type = other RNA
ataatatcaaacacgtcccggga

SEQ ID NO: 634 - RNA, 23 nt, synthetic construct
  source 1..23: mol_type = other RNA
aatatcaaacacgtcccgggagg

SEQ ID NO: 635 - RNA, 23 nt, synthetic construct
  source 1..23: mol_type = other RNA
atatcaaacacgtcccgggaggc

SEQ ID NO: 636 - RNA, 23 nt, synthetic construct
  source 1..23: mol_type = other RNA
gctcaaaggataatatcaaacac

SEQ ID NO: 637 - RNA, 23 nt, synthetic construct
  source 1..23: mol_type = other RNA
ctcaaaggataatatcaaacacg

SEQ ID NO: 638 - RNA, 21 nt, synthetic construct
  source 1..21: mol_type = other RNA
  modified_base 21: mod_base = OTHER; note = adenosine-3'-phosphate
tgcaaatagtctacaaaccaa

SEQ ID NO: 639 - RNA, 23 nt, synthetic construct
  source 1..23: mol_type = other RNA
  modified_base 5: mod_base = OTHER; note = 5'-methyluridine-3'-phosphate
  modified_base 7: mod_base = OTHER; note = 5'-methyluridine-3'-phosphate
  modified_base 23: mod_base = OTHER; note = adenosine-3'-phosphate
ttggtttgtagactatttgcaca

SEQ ID NO: 640 - RNA, 21 nt, synthetic construct
  source 1..21: mol_type = other RNA
  modified_base 1: mod_base = OTHER; note = 2'-O-methyluridine-3'-phosphorothioate
  modified_base 2: mod_base = OTHER; note = 2'-O-methylguanosine-3'-phosphorothioate
  modified_base 3: mod_base = OTHER; note = 2'-O-methylcytidine-3'-phosphate
  modified_base 4: mod_base = OTHER; note = 2'-O-methyladenosine-3'-phosphate
  modified_base 5: mod_base = OTHER; note = 2'-O-methyladenosine-3'-phosphate
  modified_base 6: mod_base = OTHER; note = 2'-O-hexadecyl-adenosine-3'-phosphate
  modified_base 7: mod_base = OTHER; note = 2'-O-methyluridine-3'-phosphate
  modified_base 8: mod_base = OTHER; note = 2'-O-methyladenosine-3'-phosphate
  modified_base 9: mod_base = OTHER; note = 2'-deoxy-2'-fluoroguanosine-3'-phosphate
  modified_base 10: mod_base = OTHER; note = 2'-deoxy-2'-fluorouridine-3'-phosphate
  modified_base 11: mod_base = OTHER; note = 2'-deoxy-2'-fluorocytidine-3'-phosphate
  modified_base 12: mod_base = OTHER; note = 2'-O-methyluridine-3'-phosphate
  modified_base 13: mod_base = OTHER; note = 2'-O-methyladenosine-3'-phosphate
  modified_base 14: mod_base = OTHER; note = 2'-O-methylcytidine-3'-phosphate
  modified_base 15: mod_base = OTHER; note = 2'-O-methyladenosine-3'-phosphate
  modified_base 16: mod_base = OTHER; note = 2'-O-methyladenosine-3'-phosphate
  modified_base 17: mod_base = OTHER; note = 2'-O-methyladenosine-3'-phosphate
  modified_base 18: mod_base = OTHER; note = 2'-O-methylcytidine-3'-phosphate
  modified_base 19: mod_base = OTHER; note = 2'-O-methylcytidine-3'-phosphate
  modified_base 20: mod_base = OTHER; note = 2'-O-methyladenosine-3'-phosphate
  modified_base 21: mod_base = OTHER; note = 2'-O-methyladenosine-3'-phosphate 0
tgcaaatagtctacaaaccaa

SEQ ID NO: 641 - DNA, 23 bp, synthetic construct
  source 1..23: mol_type = other DNA
  modified_base 1: mod_base = OTHER; note = 2'-O-methyluridine-3'-phosphorothioate 5'-(E)-Vinylphosphonate
  modified_base 2: mod_base = OTHER; note = 2'-deoxy-2'-fluorouridine-3'-phosphorothioate
  modified_base 3: mod_base = OTHER; note = 2'-O-methylguanosine-3'-phosphate
  modified_base 4: mod_base = OTHER; note = 2'-O-methylguanosine-3'-phosphate
  modified_base 6: mod_base = OTHER; note = 2'-O-methyluridine-3'-phosphate
  modified_base 7: mod_base = OTHER; note = Thymidine-glycol nucleic acid (GNA), S-Isomer
  modified_base 8: mod_base = OTHER; note = 2'-O-methylguanosine-3'-phosphate
  modified_base 9: mod_base = OTHER; note = 2'-O-methyluridine-3'-phosphate
  modified_base 10: mod_base = OTHER; note = 2'-O-methyladenosine-3'-phosphate
  modified_base 11: mod_base = OTHER; note = 2'-O-methylguanosine-3'-phosphate
  modified_base 12: mod_base = OTHER; note = 2'-O-methyladenosine-3'-phosphate
  modified_base 13: mod_base = OTHER; note = 2'-O-methylcytidine-3'-phosphate
  modified_base 14: mod_base = OTHER; note = 2'-deoxy-2'-fluorouridine-3'-phosphate
  modified_base 15: mod_base = OTHER; note = 2'-O-methyladenosine-3'-phosphate
  modified_base 16: mod_base = OTHER; note = 2'-deoxy-2'-fluorouridine-3'-phosphate
  modified_base 17: mod_base = OTHER; note = 2'-O-methyluridine-3'-phosphate
  modified_base 18: mod_base = OTHER; note = 2'-O-methyluridine-3'-phosphate
  modified_base 19: mod_base = OTHER; note = 2'-O-methylguanosine-3'-phosphate
  modified_base 20: mod_base = OTHER; note = 2'-O-methylcytidine-3'-phosphate
  modified_base 21: mod_base = OTHER; note = 2'-O-methyladenosine-3'-phosphorothioate
  modified_base 22: mod_base = OTHER; note = 2'-O-methylcytidine-3'-phosphorothioate
  modified_base 23: mod_base = OTHER; note = 2'-O-methyladenosine
  misc_feature 1..4: note = RNA
  misc_feature 6..23: note = RNA
  misc_feature 5: note = DNA
ttggtttgtagactatttgcaca

SEQ ID NO: 642 - RNA, 21 nt, synthetic construct
  source 1..21: mol_type = other RNA
  modified_base 21: mod_base = OTHER; note = adenosine-3'-phosphate
cgcatggtcagtaaaagcaaa

SEQ ID NO: 643 - RNA, 23 nt, synthetic construct
  source 1..23: mol_type = other RNA
  modified_base 23: mod_base = OTHER; note = guanosine-3'-phosphate
tttgcttttactgaccatgcgag

SEQ ID NO: 644 - RNA, 21 nt, synthetic construct
  source 1..21: mol_type = other RNA
  modified_base 1: mod_base = OTHER; note = 2'-O-methylcytidine-3'-phosphorothioate
  modified_base 2: mod_base = OTHER; note = 2'-O-methylguanosine-3'-phosphorothioate
  modified_base 3: mod_base = OTHER; note = 2'-O-methylcytidine-3'-phosphate
  modified_base 4: mod_base = OTHER; note = 2'-O-methyladenosine-3'-phosphate
  modified_base 5: mod_base = OTHER; note = 2'-O-methyluridine-3'-phosphate
  modified_base 6: mod_base = OTHER; note = 2'-O-hexadecyl-guanosine-3'-phosphate
  modified_base 7: mod_base = OTHER; note = 2'-deoxy-2'-fluoroguanosine-3'-phosphate
  modified_base 8: mod_base = OTHER; note = 2'-O-methyluridine-3'-phosphate
  modified_base 9: mod_base = OTHER; note = 2'-deoxy-2'-fluorocytidine-3'-phosphate
  modified_base 10: mod_base = OTHER; note = 2'-deoxy-2'-fluoroadenosine-3'-phosphate
  modified_base 11: mod_base = OTHER; note = 2'-deoxy-2'-fluoroguanosine-3'-phosphate
  modified_base 12: mod_base = OTHER; note = 2'-O-methyluridine-3'-phosphate
  modified_base 13: mod_base = OTHER; note = 2'-O-methyladenosine-3'-phosphate
  modified_base 14: mod_base = OTHER; note = 2'-O-methyladenosine-3'-phosphate
  modified_base 15: mod_base = OTHER; note = 2'-O-methyladenosine-3'-phosphate
  modified_base 16: mod_base = OTHER; note = 2'-O-methyladenosine-3'-phosphate
  modified_base 17: mod_base = OTHER; note = 2'-O-methylguanosine-3'-phosphate
  modified_base 18: mod_base = OTHER; note = 2'-O-methylcytidine-3'-phosphate
  modified_base 19: mod_base = OTHER; note = 2'-O-methyladenosine-3'-phosphorothioate
  modified_base 20: mod_base = OTHER; note = 2'-O-methyladenosine-3'-phosphorothioate
  modified_base 21: mod_base = OTHER; note = 2'-O-methyladenosine-3'-phosphate
cgcatggtcagtaaaagcaaa

SEQ ID NO: 645 - RNA, 23 nt, synthetic construct
  source 1..23: mol_type = other RNA
  modified_base 1: mod_base = OTHER; note = 2'-O-methyluridine-3'-phosphorothioate 5'-(E)-Vinylphosphonate
  modified_base 2: mod_base = OTHER; note = 2'-deoxy-2'-fluorouridine-3'-phosphorothioate
  modified_base 3: mod_base = OTHER; note = 2'-O-methyluridine-3'-phosphate
  modified_base 4: mod_base = OTHER; note = 2'-O-methylguanosine-3'-phosphate
  modified_base 5: mod_base = OTHER; note = 2'-O-methylcytidine-3'-phosphate
  modified_base 6: mod_base = OTHER; note = 2'-deoxy-2'-fluorouridine-3'-phosphate
  modified_base 7: mod_base = OTHER; note = 2'-O-methyluridine-3'-phosphate
  modified_base 8: mod_base = OTHER; note = 2'-deoxy-2'-fluorouridine-3'-phosphate
  modified_base 9: mod_base = OTHER; note = 2'-deoxy-2'-fluorouridine-3'-phosphate
  modified_base 10: mod_base = OTHER; note = 2'-O-methyladenosine-3'-phosphate
  modified_base 11: mod_base = OTHER; note = 2'-O-methylcytidine-3'-phosphate
  modified_base 12: mod_base = OTHER; note = 2'-O-methyluridine-3'-phosphate
  modified_base 13: mod_base = OTHER; note = 2'-O-methylguanosine-3'-phosphate
  modified_base 14: mod_base = OTHER; note = 2'-deoxy-2'-fluoroadenosine-3'-phosphate
  modified_base 15: mod_base = OTHER; note = 2'-O-methylcytidine-3'-phosphate
  modified_base 16: mod_base = OTHER; note = 2'-deoxy-2'-fluorocytidine-3'-phosphate
  modified_base 17: mod_base = OTHER; note = 2'-O-methyladenosine-3'-phosphate
  modified_base 18: mod_base = OTHER; note = 2'-O-methyluridine-3'-phosphate
  modified_base 19: mod_base = OTHER; note = 2'-O-methylguanosine-3'-phosphate
  modified_base 20: mod_base = OTHER; note = 2'-O-methylcytidine-3'-phosphate
  modified_base 21: mod_base = OTHER; note = 2'-O-methylguanosine-3'-phosphorothioate
  modified_base 22: mod_base = OTHER; note = 2'-O-methyladenosine-3'-phosphorothioate
  modified_base 23: mod_base = OTHER; note = 2'-O-methylguanosine
tttgcttttactgaccatgcgag
